(19) United States
(12) Patent Application Publication
(10) Pub. No.: US 2022/0402998 A1
(43) Pub. Date: Dec. 22, 2022

(54) PROTEASE SWITCH FOR DUAL TARGETS CHIMERIC ANTIGEN RECEPTOR T CELL THERAPY

(71) Applicant: THE TEXAS A&M UNIVERSITY SYSTEM, COLLEGE STATION, TX (US)

(72) Inventors: WENSHE RAY LIU, COLLEGE STATION, TX (US); WENYUE CAO, COLLEGE STATION, TX (US)

(21) Appl. No.: 17/772,539

(22) PCT Filed: Oct. 30, 2020
(86) PCT No.: PCT/US2020/058185

§ 371 Date: Apr. 28, 2022

Related U.S. Application Data
(60) Provisional application No. 62/927,898, filed on Oct. 30, 2019.

(51) Int. Cl. C07K 14/725; C07K 14/705; A61K 35/17; A61P 35/00; C12N 9/50; C07K 16/28

(52) U.S. Cl. CPC C07K 14/7051; C07K 14/70521; A61K 35/17; A61P 35/00; C12N 9/50; C07K 16/2803; C07K 14/70578; C07K 2319/03; C07K 2317/622; C07K 2319/02; C07K 2319/33

(57) ABSTRACT

The subject invention pertains to a chimeric antigen receptor, a T cell comprising said CAR and methods of making and using said CAR and said T cell for the treatment of a cancer and/or an immune disease. In specific embodiments, the method comprises the use of T cells comprising CARs to target different antigens on target cells. In further specific embodiments, the CARs of the invention comprise NS3 protease domains and cleavage sites, which NS3 domains are inhibited by small molecule inhibitors for customized CAR-T cell therapy.

### CROSS-REFERENCE TO RELATED APPLICATION

[0001] This application claims the benefit of U.S. Provisional Application Ser. No. 62/927,898, filed Oct. 30, 2019, the disclosure of which is hereby incorporated by reference in its entirety, including all figures, tables and amino acid or nucleic acid sequences.

[0002] The Sequence Listing for this application is labeled “Seq-List.txt” which was created on Oct. 29, 2020 and is 1,053 KB. The entire content of the sequence listing is incorporated herein by reference in its entirety.

### BACKGROUND OF THE INVENTION

[0003] This section provides background information to facilitate a better understanding of the various aspects of the invention. It should be understood that the statements in this section of this document are to be read in this light, and not as admissions of prior art.

[0004] Adoptive T cell therapy utilizing autologous cells genetically engineered to target tumor antigens has revolutionized the treatment of hematological malignancies. Synthetic chimeric antigen receptors (CARs) targeting the tumor antigens have been used to transduce T cells (CAR-T cells) to target them towards tumors expressing the tumor antigen.

[0005] T cells expressing CARs are generated by genetic engineering and are designed to arm the immunocompetent T cells of a patient with an activating receptor consisting of (1) an extracytoplasmic variable fragment of an immunoglobulin, e.g., a single chain variable fragment (scFv), directed against a tumor target, (2) an intracellular T-cell receptor activation molecule (e.g., CD3 zeta (CD3ζ)), and (3) positive co-stimulation molecules, e.g., CD28 and/or 4-1BB. T cells obtained from a patient are transformed with a vector, e.g., a retro- or lentiviral vector that transfers the desired DNA sequences encoding the above elements into the genome of the transduced T cell, such that the elements of the exogenous CAR are expressed in the transduced T cell. Expression of these elements is generally controlled by promoters that are either constitutive providing a continuous expression of the CAR elements or inducible providing expression of the CAR elements only when the inducing agent is present. Alternatively, the promoters can be endogenously regulated and provide expression of the CAR elements whenever the protein that is normally controlled by the endogenous promoter is expressed. Generally, strong promoters that induce high levels of the proteins are desirable in genetically engineered cells.

[0006] Although mostly immunocompetent T cells are used for the expression of CARs, any immune cells capable of being activated by a CD3-zeta and costimulatory CD28 and/or 4-1BB molecules can be used to express CARs.

[0007] The genetically engineered T cells of a patient expressing a CAR are capable of recognizing, e.g., a tumor target without Major Histocompatibility Complex (MHC) restriction, and destroying a target through cytotoxic effector mechanisms.

[0008] Furthermore, allogenic CAR-T cells can be generated with lymphocytes from hematopoietic stem cell donors and used, e.g., in the context of post-allograft relapse.

[0009] Methods of treatment using CAR-T cells involve lympho-depletion of a patient's T cells to make room for the patient's newly generated CAR-T cells to home after i.v. infusion. The immune-depletion further provides potentially a decrease in residual tumor mass, an induction of inflammation, the release of tumor antigen, and the decrease in the number of regulatory T cells, the latter of which could suppress the function of newly infused engineered CAR-T cells. Furthermore, if any elements of the CAR are of non-human origin the lympho-depletion may also decrease the risk of immunization against this CAR element. The use of variable fragments of humanized immunoglobulin in the construction of CARs can also aid in lowering the risk of immunization against CARs.

[0010] The inability to control CAR-T cells after infusion into patients has raised safety concerns. For example, on-target/off-tumor and off-target antigen recognition were observed in some patients during clinical trials. Further, uncontrolled CAR-T cell action in vivo can result in severe adverse events involving cytokine release syndrome and CAR-T related encephalopathy syndrome. For example, two major safety concerns of CAR-T cell therapies are the cytokine release syndrome and neurological toxicity, such as, e.g., CAR-T cell-related encephalopathy syndrome. Unfortunately, the cytokine release syndrome is relatively frequent and can occur in about 50% to 100% of patients receiving CAR-T cell therapy. Furthermore, extensive activation of T cells, in general, and CAR-T cells specifically leads to T cell death and, thus, exhaustion of the CAR-T cell population, In order to extend the lifespan of CAR-T cells following infusion into a patient, it would be desirable to control CAR-T cell activation, These safety and efficacy concerns are related to the inability to control CAR-T activation, expansion and, more importantly, terminate the expression of CARs in therapeutic CAR-T cells. Therefore, temporal and spatial control of CARs in therapeutic CAR-T cells could improve the safety and efficacy profile of this important technology and could curb, e.g., an excessive cytokine release and CAR-T cell exhaustion by fine-tuning the expression levels of CARs on CAR-T cells. Further, by allowing CAR fine-tuning on CAR-T cells, CAR expression could be turned off during remission and turned back on in the case of disease relapse.

[0011] A further problem for CAR-T therapy is a lack of or low response and relapse after CAR-T cell therapy related to a loss of antigen expression on the target cells. The use of CAR-T cells that are targeting more than one antigen can, therefore, be useful to address this issue. Thus, there is a need to develop new CAR-T cell therapies that can address the safety and efficacy concerns and the potential target cell resistance.

### BRIEF SUMMARY OF THE INVENTION

[0012] The instant invention provides chimeric-antigen-receptor (CAR) T cell systems and methods of making and using these for therapies of diseases that can be treated with targeted immune cells. The CAR-T cell systems of the instant invention comprise an inducible switch design based on a non-structural protein 3 (NS3) protease domain of the hepatitis C virus that can be used to fine-tune CAR expression in genetically engineered CAR-T cells. With this design, the safety and potency of CAR T cell therapy can be substantially improved.

[0013] Advantageously, the NS3 protease domain of the instant CAR T cell system provides a default auto-proteolysis of the CAR in transduced T cells as a means for maximum control over CAR expression and avoidance of CAR presence in a patient when such presence is not desired.

[0014] In contrast, when CAR expression is desired, a small molecule inhibitor can be administered to inhibit the proteolytic activity of the NS3 domain and block CAR auto-proteolysis leading to expression of the CAR on the surface of engineered CAR-T cells. Moreover, dose-dependent administration of said small molecule inhibitor to a subject treated with engineered CAR-T cells allows a fine-tuning of the level of CAR expression by engineered CAR-T cells and can be adjusted, e.g., according to the remaining burden of target cells and/or the occurrence of adverse events such as a cytokine release syndrome.

[0015] Advantageously, the CAR-T cell systems of the invention can comprise a variety of single-chain variable fragments against a variety of disease-related antigens including, but not limited to, cancer- and/or immune disorder-related antigens to treat cancer and/or immune disorders.

[0016] Further provided are CAR-T cell systems that simultaneously target at least two target antigens on the same or different target cells to improve therapeutic efficacy and lower the risk for adverse events.

[0017] For example, in one embodiment the invention provides CD19-CAR and CD22-CAR “cocktails” and/or CD19-CAR-T cell and CD22-CAR-T cell “cocktails” to provide high efficiency treatment for B-cell leukemia.

[0018] Advantageously, the CAR-T cell systems of the instant invention combine safety switches and dual target designs. For example, this strategy targets both CD19 and CD22 simultaneously, enabling more extensive cover for B-cell malignancies, reducing relapse caused by antigen escape and improving therapeutic efficacy. Furthermore, the novel protease switch system provides a precise regulation of CAR-T cell activity and allows the avoidance of CAR-T cell exhaustion in vivo because CAR expression can be stopped to prevent CAR-T cell overactivation and prolong CAR-T cell life in patients. This novel CAR-T cell system, thus, increases the safety and potency of CAR-T cell therapies.

### BRIEF DESCRIPTION OF THE DRAWINGS

[0019] The patent or application file contains at least one drawing executed in color. Copies of this patent or patent application publication, with color drawing(s), will be provided by the Office upon request and payment of the necessary fee.

[0020] FIGS. 1A-1C show drawings of the CAR-T cell system of the instant invention. FIG. 1A shows a target cell and T cell interacting through a CAR-tumor antigen (TAA) binding event. FIG. 1B shows a detailed drawing of the CAR of the invention in an “off” and “on” state in the absence and presence of the NS3 inhibitor asunaprevir (ASV). FIG. 1C shows NS3-CAR constructs of the invention with a first cleavage site (1CS), a second cleavage site (2CS), and both cleavage sites. The yellow lines indicate NS3 cleavage sites and the red arrows indicate cleavage action of NS3 protease in the absence of asunaprevir.

[0021] FIG. 2 shows the CAR cassettes of a control CAR (top) and a NS3 switch-CAR (bottom) used for transduction of T cells to generate CAR-T cells.

[0022] FIG. 3 shows flow cytometry analyses of CD19-CAR expression in untransduced cells, CD19-CAR transduced cells, cells transduced with NS3-CD19-CAR without asunaprevir treatment and cells transduced with NS3-CD19-CAR with asunaprevir treatment.

[0023] FIGS. 4A-4B show CAR expression levels in CAR-transduced cells in the presence of increasing asunaprevir concentrations. FIG. 4A shows CAR expression determined by flow cytometry. FIG. 4B shows percentage of CAR expressing cells at different time points and in the presence of different concentrations of asunaprevir.

[0024] FIGS. 5A-5B show CAR expression levels in CAR-transduced cells upon withdrawal of asunaprevir. FIG. 5A shows flow cytometric data on CAR expression at 24 hours and 48 hours after asunaprevir withdrawal. FIG. 5B shows flow cytometric data on CAR expression at 24 hours and 48 hours in the presence of asunaprevir.

[0025] FIGS. 6A-6B show cell death and CD4/CD8 profiles of CAR-transduced cells in the presence and absence of asunaprevir. FIG. 6A shows flow cytometric data on annexin V expression and propidium iodine staining of untransduced cells, CD19-CAR transduced cells and cells transduced with NS3-CD19 CAR in the presence and absence of asunaprevir.

[0026] FIG. 6B shows flow cytometric data on CD4 and CD8 expression on untransduced cells, CD19-CAR transduced cells and cells transduced with NS3-CD19 CAR in the presence and absence of asunaprevir.

[0027] FIG. 7 shows a map of plasmid PLVX-EF1a-NS3 WT.

[0028] FIG. 8 shows a map of plasmid PLVX-EF1a-NS3 T54A.

[0029] FIG. 9 shows a map of plasmid PLVX-EF1a-NS3 1CS.

[0030] FIG. 10 shows a map of plasmid PLVX-EF1a-NS3 2CS.

[0031] FIG. 11 shows a map of plasmid PLVX-EF1a-NS3 AI.

[0032] FIG. 12 shows a map of plasmid PLVX-EF1a-NS3 TI.

[0033] FIG. 13 shows a map of plasmid PLVX-EF1a-NS3 Double Switch 1.

[0034] FIG. 14 shows a map of plasmid PLVX-EF1a-NS3 Double Switch 2.

### BRIEF DESCRIPTION OF THE SEQUENCES

[0035] SEQ ID NO: 1 is the amino acid sequence of a CD8-alpha signal peptide of a CAR of the invention.

[0036] SEQ ID NO: 2 is the amino acid sequence of a CD19-single chain variable fragment of a CAR of the invention.

[0037] SEQ ID NO: 3 is the amino acid sequence of a CD22-single chain variable fragment of a CAR of the invention.

[0038] SEQ ID NO: 4 is the amino acid sequence of a CD8 alpha hinge region of a CAR of the invention.

[0039] SEQ ID NO: 5 is the amino acid sequence of a CD28 hinge region of a CAR of the invention.

[0040] SEQ ID NO: 6 is the amino acid sequence of an IgG4 hinge region of a CAR of the invention.

[0041] SEQ ID NO: 7 is the amino acid sequence of an IgG4m hinge region of a CAR of the invention.

[0042] SEQ ID NO: 8 is the amino acid sequence of an IgG1 hinge region of a CAR of the invention.

[0043] SEQ ID NO: 9 is the amino acid sequence of an IgG2 hinge region of a CAR of the invention.

[0044] SEQ ID NO: 10 is the amino acid sequence of an IgG4 CH2 CH3 hinge and spacer region of a CAR of the invention.

[0045] SEQ ID NO: 11 is the amino acid sequence of an IgG2 CH2 CH3 hinge and spacer region of a CAR of the invention.

[0046] SEQ ID NO: 12 is the amino acid sequence of an IgG1 CH2 CH3 hinge and spacer region of a CAR of the invention.

[0047] SEQ ID NO: 13 is the amino acid sequence of a CD28 transmembrane domain of a CAR of the invention.

[0048] SEQ ID NO: 14 is the amino acid sequence of a CD8-alpha transmembrane domain of a CAR of the invention.

[0049] SEQ ID NO: 15 is the amino acid sequence of a CD4 transmembrane domain of a CAR of the invention.

[0050] SEQ ID NO: 16 is the amino acid sequence of a CD3-zeta transmembrane domain of a CAR of the invention.

[0051] SEQ ID NO: 17 is the amino acid sequence of an ICOS transmembrane domain of a CAR of the invention.

[0052] SEQ ID NO: 18 is the amino acid sequence of a 4-1BB intracellular domain of a CAR of the invention.

[0053] SEQ ID NO: 19 is the amino acid sequence of a CD28 intracellular domain of a CAR of the invention.

[0054] SEQ ID NO: 20 is the amino acid sequence of a CD3-zeta intracellular domain of a CAR of the invention.

[0055] SEQ ID NOs: 21-979 are the amino acid sequences of light chain variable domains and heavy chain variable domains of the antibodies listed in Table 2.

[0056] SEQ ID NO: 980 is the amino acid sequence of a wild-type NS3 protease domain of a CAR of the invention.

[0057] SEQ ID NO: 981 is the amino acid sequence of a T54A mutant NS3 protease domain of a CAR of the invention.

[0058] SEQ ID NO: 982 is the amino acid sequence of an asunaprevir-inhibitable (AI) NS3 protease domain of a CAR of the invention.

[0059] SEQ ID NO: 983 is the amino acid sequence of a telaprevir-inhibitable (TI) NS3 protease domain of a CAR of the invention.

[0060] SEQ ID NO: 984 is the amino acid sequence of a NS4A domain of a CAR of the invention.

[0061] SEQ ID NO: 985 is the amino acid sequence of a first protease cleavage site of a CAR of the invention.

[0062] SEQ ID NO: 986 is the amino acid sequence of a second protease cleavage site of a CAR of the invention.

[0063] SEQ ID NO: 987 is the amino acid sequence of a third protease cleavage site of a CAR of the invention.

[0064] SEQ ID NO: 988 is the amino acid sequence of a fourth protease cleavage site of a CAR of the invention.

[0065] SEQ ID NO: 989 is the amino acid sequence of a first self-cleaving viral 2A peptide (T2A) of a CAR of the invention.

[0066] SEQ ID NO: 990 is the amino acid sequence of a second self-cleaving viral 2A peptide (P2A) of a CAR of the invention.

[0067] SEQ ID NO: 991 is the amino acid sequence of a CD19 light chain of a CAR of the invention.

[0068] SEQ ID NO: 992 is the amino acid sequence of a CD19 heavy chain of a CAR of the invention.

[0069] SEQ ID NO: 993 is the amino acid sequence of a CD22 heavy chain of a CAR of the invention.

[0070] SEQ ID NO: 994 is the amino acid sequence of a CD22 light chain of a CAR of the invention.

[0071] SEQ ID NO: 995 is the amino acid sequence of a first single chain variant fragment linker.

[0072] SEQ ID NO: 996 is the amino acid sequence of a second single chain variant fragment linker.

[0073] SEQ ID NO: 997 is the amino acid sequence of a third single chain variant fragment linker.

### DETAILED DISCLOSURE OF THE INVENTION

[0074] Provided are chimeric-antigen-receptor (CAR) T cell systems and methods of making and using these systems for therapies of oncological and other diseases. The CAR-T cell systems of the invention use chemogenetic control of protein function to achieve both customized and reliable on- and off-effects. The inducible switch design of the instant invention is based on the non-structural protein 3 (NS3) protease domain of the hepatitis C virus (HCV), which NS3 domain self-cleaves at specific cleavage sites.

[0075] The NS3 protease domain of the CAR-T cell system of the invention is localized within the CAR construct such that the auto-proteolytic activity of the NS3 protease cleaves the CAR construct by default. In contrast, in the presence of a small molecule inhibitor that blocks the NS3 proteolytic activity the engineered CARs of the invention are expressed on the surface of CAR transduced T cells. The CAR-T cell system of the invention allows dose-dependent induction of CAR expression on transduced T cells and removal of CARs from T cells upon withdrawal of the small molecule inhibitor. Therefore, this novel regulated CAR-T cell system allows customized CAR-T cell therapy though expression of CARs on transduced T cells and further enables the maintenance of CAR-transduced T cells.

[0076] In specific embodiments of the instant invention, T cells expressing CARs are generated by genetic engineering to arm the immunocompetent T cells of a patient with an activating receptor comprising (1) an extracytoplasmic variable fragment of an immunoglobulin, e.g., a single chain variable fragment (scFv), directed against a tumor target or an immune cell target, (2) a NS3 protease domain, (3) a hinge region, (4) a transmembrane domain, (5)) at least one positive co-stimulation molecule domain from, e.g., CD28 and/or 4-1BB, and (6) an intracellular T-cell receptor activation molecule domain from e.g., CD3-zeta.

[0077] In some embodiments, the CARs of the invention are engineered using the entire intracellular signaling domain of a T cell receptor. In other embodiments, parts of the entire intracellular signaling domain of a T cell receptor can be used. To the extent that a truncated portion of the intracellular signaling domain of a TCR is used, such truncated portion may be used in place of the intact chain as long as it transduces the effector function signal. In specific embodiments, the intracellular signaling domain of a CAR of the instant invention is a truncated portion of the intracellular signaling domain capable of transducing the effector function signal of a TCR.

[0078] Examples of intracellular signaling domains for use in the CAR of the invention include, but are not limited to, the cytoplasmic sequences of T cell receptors and co-receptors that initiate signal transduction following antigen receptor engagement, as well as any derivatives or variants of these sequences and any synthetic sequences that have equivalent functional capability.

[0079] In certain embodiments, the intracellular domain of the CAR further comprises a secondary or co-stimulatory signal. The costimulatory signaling portion refers to a region of the CAR comprising the intracellular domain of a costimulatory molecule. A costimulatory molecule is a cell surface molecule other than an antigen receptor or their ligands that is required for an efficient response of lymphocytes to an antigen.

[0080] In some embodiments, T cell activation is mediated by two distinct classes of intracellular signaling sequences: those that initiate antigen-dependent primary activation through the TCR (primary intracellular signaling sequences) and those that act in an antigen-independent manner to provide a secondary or co-stimulatory signal (secondary intracellular signaling sequences).

[0081] In some embodiments, the intracellular domain of a CAR of the invention comprises a CD3-zeta signaling domain, and optionally, any other desired cytoplasmic domain(s) useful in the context of a CAR. For example, in some embodiments, the intracellular domain of the CAR comprises a CD3-zeta chain portion and a costimulatory signaling domain. Examples of costimulatory molecules from which costimulatory signaling domains can be derived and used in the generation of CARs of the instant invention include, but are not limited to, CD27, CD28, 4-1BB (CD137), OX40, CD30, CD40, PD-1, ICOS (CD278), lymphocyte function-associated antigen-1 (LFA-1), CD2, CD7, TNFSF14, NKG2C, B7-H3, CD132, and ILRβ(CD122). While the use of CD28 and 4-1BB as co-stimulatory signaling elements (costimulatory signaling domains) are exemplified in the Examples, other costimulatory signaling domains (e.g., OX40, CD30, CD40, PD-1, ICOS (CD278), lymphocyte function-associated antigen-1 (LFA-1), CD2, CD7, TNFSF14, NKG2C, B7-H3, CD132, and ILRβ(CD122)) can be used and are within the scope of the invention.

[0082] In preferred embodiments, the intracellular domain of the CAR of the invention comprises one or more signaling domains including, but not limited to, signaling domains of CD3-zeta, CD28, and 4-1BB.

[0083] In some embodiments, the CARs of the invention comprise hinge regions including, but not limited to, a CD8-alpha hinge region, a CD28 hinge region, an IgG4 hinge region, an IgG4m hinge region, an IgG1 hinge region, an IgG2 hinge region. In some embodiments, the CARs of the invention comprise a hinge region and a spacer including but not limited to, an IgG4 CH2 CH3 hinge and spacer, an IgG2 CH2 CH3 hinge and spacer, or an IgG1 CH2 CH3 hinge and spacer.

[0084] In some embodiments, the CARs of the invention comprise transmembrane domain including, but not limited to, a CD28 transmembrane domain, a CD8-alpha transmembrane domain, a CD4 transmembrane domain, a CD3-zeta transmembrane domain, or an ICOS transmembrane domain,

[0085] CARs useful according to the present invention include first generation CARs, second generation CARs, and third generation CARs. First generation CARs comprise a binding moiety specifically recognizing an antigen of interest and a T cell activating signaling domain (without an intracellular costimulatory domain). Second and third generation CARs include signal sequences from various costimulatory molecules. Second generation CARs comprise a binding moiety specifically recognizing an antigen of interest, a T cell activating intracellular signaling domain, and one intracellular costimulatory domain. Third generation CARs comprise a binding moiety specifically recognizing an antigen of interest, a T cell activating intracellular signaling domain, and two or more intracellular costimulatory domains.

[0086] In some embodiments of first generation CARs, the intracellular domains comprise the signaling domain of CD3-zeta. In some embodiments of second generation CARs, the intracellular domains comprise the signaling domains of CD3-zeta and CD28. In some embodiments of third generation CARs, the intracellular domains comprise the signaling domains of CD3-zeta, CD28 and 4-1BB. In certain embodiments, the cytoplasmic domains of the CARs comprise any combination of CD3-zeta, CD28, and 4-1BB signaling domains or any combination of any other signaling domains useful in inducing T cell activation.

[0087] In preferred embodiments, the CARs of the invention comprise a single chain variable fragment of an antibody (scFv) a Non-Structural protein 3 (NS3) protease domain of hepatitis C virus (HCV), a human CD8 hinge and transmembrane domain, and human CD3 zeta, human CD28, and human 4-1BB signaling domains.

[0088] In some embodiments, the NS3 protease domain is integrated into the CAR at a specific location such that the NS3 protease activity cleaves the CAR protein construct at specific predetermined protease cleavage sites and prevents expression of an intact CAR protein construct on the cell surface.

[0089] In some embodiments, the NS3 protease domain further comprises NS4 protein sequences of HCV to ensure proper NS3 protease expression and function. In other embodiments, the CAR construct can comprise a protease domain originating from sequences of HCV NS2 and NS3 proteases. In preferred embodiments of the invention, the NS3 protease domain comprises NS4A sequences (NS3/4A protease domain).

[0090] In some embodiments, the CAR-T cells comprise an antigen-binding domain of an antibody that binds specifically to a cancer antigen and/or an immune cell antigen, a NS3/4A protease domain, cleavage sites, a hinge region, a transmembrane domain, and the intracellular signaling domain of CD3-zeta. In some embodiments, the CAR-T cells comprise an antigen-binding domain of an antibody that binds specifically to a cancer antigen and/or an immune cell antigen, a NS3/4A protease domain, cleavage sites, a hinge region, a transmembrane domain, the intracellular signaling domain of CD3-zeta, and the intracellular signaling domain of CD28. In some embodiments, the CAR-T cells comprise an antigen-binding domain of an antibody that binds specifically to a cancer antigen and/or an immune cell antigen, a NS3/4A protease domain, cleavage sites, a hinge region, a transmembrane domain, the intracellular signaling domain of CD3-zeta, the intracellular signaling domain of CD28, and the intracellular signaling domain of 4-1BB.

[0091] In some embodiments, the scFv comprise variable portions of the antibody heavy and light chains fused by a flexible linker. The linkers of the CARs of the invention include, but are not limited to, the single chain variable fragment linkers of SEQ ID NOs:995-997. In specific embodiments, the flexible linker allows the scFv to orient in different directions to enable antigen binding. In some embodiments, the CARs of the invention, when expressed in T cells, are able to direct antigen recognition based on the antigen binding specificity to activate a T cell-mediated immune response.

[0092] The single chain variable domain of the CAR of the instant invention can be engineered to target any one or more proteins present on the surface of a target cell. For example variable domain regions of antibodies that bind an antigen on a target cell can be engineered as single chain variable fragments of the CARs and can be used to generate CAR-T cells of the invention that target the specific antigen. The antigens that can be targeted by CAR-T cells of the invention include, but are not limited to, parasitic antigens, bacterial antigens, viral antigens and auto-antigens.

[0093] In some embodiments, the CARs of the invention comprise a single chain variable fragment of an anti-cancer antibody (anti-cancer scFv), a NS3/4A protease domain, cleavage sites, a human CD8 hinge and transmembrane domain, and human CD3-zeta, human CD28, and human 4-1BB signaling domains.

[0094] In some embodiments, the CARs of the invention comprise a single chain variable fragment of an anti-immune cell antibody (anti-immune cell scFv), a NS3/4A protease domain, cleavage sites, a human CD8 hinge and transmembrane domain, and human CD3-zeta, human CD28, and human 4-1BB signaling domains.

[0095] In some embodiments, the CARs of the invention comprise a single chain variable fragment of an antibody binds a parasitic antigen, a bacterial antigen and/or a viral antigen (anti-infectious scFv), a NS3/4A protease domain, cleavage sites, a human CD8 hinge and transmembrane domain, and human CD3-zeta, human CD28, and human 4-1BB signaling domains.

[0096] In some embodiments, the CARs of the invention comprise a single chain variable fragment of an antibody that binds an auto-immune-reactive cell (anti-auto-immune cell scFv), a NS3/4A protease domain, cleavage sites, a human CD8 hinge and transmembrane domain, and human CD3-zeta, human CD28, and human 4-1BB signaling domains. Advantageously, the CARs of the invention can be used to fine-tune CAR expression of CAR-T cells and, thus, allow the safe targeting of antigens on auto-reactive cells where the CAR expression can be turned off once the auto-reactive cells have been targeted to avoid targeting non-auto-reactive cells that might express similar antigens.

[0097] An anti-cancer antibody, as used herein, refers to any antibody that binds to any antigen that is present on a cancer cell.

[0098] An anti-immune cell antibody, as used herein, refers to any antibody that binds to any antigen that is present on an immune cell.

[0099] Examples of antibodies that comprise variable domains that can be used in the engineering of CARs of the instant invention include, but are not limited to, antibodies that specifically bind to alpha feto protein 1; anaplastic lymphoma kinase (CD246); V-set domain-containing T-cell activation inhibitor 1; B-cell CLL/lymphoma 2 (BCL-2); B cell receptor-Abl fusion protein (Bcr/Abl); Chorionic gonadotropin beta subunit 3 (beta-HCG); beta-2 microglobulin; B-raf proto-oncogene (BRAF); Breast cancer type 1 susceptibility protein (BRCA1); Breast cancer type 2 susceptibility protein (BRCA2); B-cell maturation antigen (BCMA); B7-like molecule H4 (B7-H4); Cancer antigen 15-3 (Ca 15-3); Cancer antigen 19-9 (Ca 19-9); calcitonin; calretinin; neprilysin (CD10); phagocytic glycoprotein-1 (CD44); protein tyrosine phosphatase receptor C (CD45); carcinoembryonic antigen (CEA); chromogranin A; tyrosine protein kinase Kit (c-kit); cytokeratin 19; epidermal growth factor receptor (EGFR); epithelial cell adhesion molecular (EpCAM); estrogen receptor-alpha; estrogen receptor-beta; folate receptor 1; epididymal secretory protein E4 (HE4); glypican-3 protein (GPC-3); immunoglobulin-associated beta (CD79b); v-erb-b2 erythroblastic leukemia viral oncogene homolog 2 (HER2); inhibin; integrin-associated protein (IAP/CD47); Interleukin-3 receptor (CD123); antigen identified by monoclonal antibody Ki-67 (Ki-67); Kirsten rat sarcoma viral oncogene homolog (KRAS); lysosomal-associated membrane protein 1 (LAMP1); leukocyte antigen CD37; melan-A (MART1); melanoma cell adhesion molecule (MCAM/CD146); mesothelin; mucin 1 (MUC1); mucin 16/ovarian carcinoma antigen 125 (MUC16/CA125); nuclear matric protein 22 (NMP22); neuron-specific enolase (NSE); neurotrophic tyrosine kinase receptor-related 1 (ROR1); nerve growth factor receptor (NGFR); tumor protein 53 (p53); cytoskeleton-associated protein 4 (p63); programmed cell death protein 1 (PD1); programmed death-ligand 1 (PD-L1/CD274); pyruvate kinase muscle (PKM); phospholipase A2-activating protein (PLAP); podoplanin; progesterone receptor; prostate-specific antigen (PSA); sialic acid binding Ig-like lectin 3 (CD33); S100 calcium binding protein A4 (S100A4); serpin peptidase inhibitor glade E (SERPINE1); secreted frizzled-related protein 1 (SFRP1) signaling lymphocyte activating-molecule-related receptor family including, but not limited to, signaling lymphocyte activating-molecule (CD150), 2B4 (CD244), CD84, NTB-A (Ly-108), and Ly-9 (CD229); syndecan-1 (CD138); tumor associated glycoprotein 72 (TAG-72); thymidine kinase; thyroglobulin; transthyretin; transcription termination factor 1 (TTF1); plasminogen activator urokinase (uPA); vascular endothelial growth factor receptor 2 (VEGR2); or vimentin.

[0100] In some embodiments of the instant invention, CARs comprise single chain variable fragments of any variable domains that bind to a desirable target antigen. Advantageously, any variable domain of any antibody binding a desired target antigen can be used to generate CARs of the instant invention because the amino acid sequences of antibody variable domains can readily be converted into single chain variable fragment sequences of the CARs of the instant invention. For example, in some embodiments, variable domains from bi-specific antibodies or multi-specific antibodies with variable domains that bind to more than two antigens can be used to generate CARs of the instant invention. In some embodiments, the heavy and light chain of a first variable domain of a bi- or multi-specific antibody can be used to generate one CAR and the heavy and light chain of a second variable domain of the bi- or multi-specific antibody can be used to generate a second CAR.

[0101] In some embodiments, a heavy and/or light chain domain of one variable domain of one antibody and a heavy and/or light chain of a second variable domain of a second antibody or of a second variable domain of a bi-specific or multi-specific antibody can be used to generate a CAR of the invention. In further embodiments, more than one heavy chain domain and more than one light chain domain can be combined by linkers to generate multi-specific CARs of the invention. The more than one heavy chain and more than one light chain domain can be from single variable domains of different antibodies or from different variable domains of bi- or multi-specific antibodies.

[0102] In further embodiments, heavy chain domains without light chain domains and light chain domains without heavy chain domains can be used to generate CARs of the invention. In some embodiments, a heavy chain from a first variable domain and a light chain from a second variable domain can be used to generate a CAR of the invention. In some embodiments, more than one heavy chain from more than one variable domain can be combined to generate a CAR of the invention. In some embodiments, more than one light chain from more than one variable domain can be combined to generate a CAR of the invention. In yet further embodiments, more than one heavy chain from more than one first group of variable domains and more than one light chain from more than one second group of variable domains can be combined to generate a CAR of the invention.

[0103] For example, the scFv of the CAR of the invention can comprise variable sequences from antibodies including, but not limited to, Abagovomab, Abelacimab, Abituzumab, Abrezekimab, Abrilumab, Actoxumab, Adalimumab, Aducanaumab, Afasevikumab, Alacizumab, Alemtuzumab, Alirocumab, Amatuximab, Andecaliximab, Anetumab, Anifrolumab, Anrukizumab, Apamistamab, Aprutumab, Ascrinvacumab, Atezolizumab, Atidortozumab, Atinumab, Atoltivimab, Avelumab, Axicabtagene Ciloleucel, Azintuxizumab, Balstilimab, Bapineuzumab, Basiliximab, Bavituximab, Bedinvetmab, Begelomab, Belantamab, Belimumab, Bemarituzumab, Benralizumab, Berlimatoxumab, Bermekimab, Bersanlimab, Bevacizumab, Bezlotoxumab, Bimagrumab, Bimekizumab, Birtamimab, Bleselumab, Blinatumomab, Blontuvetmab, Blosozumab, Bococizumab, Brazikumab, Brentuximab, Briakinumab, Brodalumab, Broluczumab, Brontictuzumab, Budigalimab, Burosumab, Cabiralizumab, Camidanlumab, Camrelizumab, Canakinumab, Cantuzumab, Caplacizumab, Carlumab, Carotuximab, Cemiplimab, Candakimab, Cergutuzumab, Certolizumab, Cetrelimab, Cetuximab, Cibisatamab, Cinpanemab, Citatuzumab, Cixutumumab, Clazakizumab, Clervonafusp, Clivatuzumab, Cobolimab, Codrituzumab, Cofetuzumab, Coltuximab, Conatumumab, Concizumab, Cosfroviximab, Crenezumab, Crizanlizumab, Crotedumab, Crovalimab, Cusatuzumab, Dacetuzumab, Daclizumab, Dalotuzumab, Dapirolizumab, Daratumumab, Dectrekumab, Demcizumab, Denintuzumab, Denosumab, Depatuxizumab, Derlotuximab, Dezamizumab, Dilpacimab, Dinutuximab, Diridavumab, Disitamab, Domagrozumab, Donanemab, Dostarlimab, Drozitumab, Duligotuzumab, Dupilumab, Durvalumab, Dusigitumab, Duvortuxizumab, Eculizumab, Edrecolomab, Efalizumab, Efungumab, Eldelumab, Elezanumab, Elgemtumab, Elipovimab, Elotuzumab, Emactuzumab, Emapalumab, Emicizumab, Emibetuzumab, Enapotamab, Enavatuzumab, Enfortumab, Enoblituzumab, Enokizumab, Enoticumab, Ensituximab, Envafolimab, Epratuzumab, Eptinezumab, Erenumab, Etaracizumab, Etigilimab, Etokimab, Etrolizumab, Evinacumab, Evolocumab, Faricimab, Farletuzumab, Fasinumab, Fezakinumab, Ficlatuzumab, Figitumumab, Firivumab, Flanvotumab, Fletikumab, Flotetuzumab, Fontolizumab, Foralumab, Foravirumab, Fremanezumab, Fresolimumab, Frovocimab, Frunevetmab, Fulranumab, Futuximab (Zatuximab), Galcanezumab, Galiximab, Gancotamab, Ganitumab, Gantenerumab, Garadacimab, Garetosmab, Gatipotuzumab, Gedivumab, Gemtuzumab, Gevokizumab, Gilvetmab, Gimsilumab, Girentuximab, Glembatumumab, Glenzocimab, Golimumab, Gosuranemab, Guselkumab, Ianalumab, Ibalizumab, Icrucumab, Idarucizumab, Ieramilimab, Ifabotuzumab, Iladatuzumab, Imalumab, Imaprelimab, Imgatuzumab, Inclacumab, Indatuximab, Indusatumab, Inebilizumab, Infliximab, Inotuzumab, Intetumumab, Ipilimumab, Iratumumab, Isatuximab, Iscalimab, Istiratumab, Itolizumab, Ixekizumab, Labetuzumab, Lacnotuzumab, Lacutamab, Ladiratuzumab, Lampalizumab, Lanadelumab, Landogrozumab, Laprituximab, Larcaviximab, Lebrikizumab, Lenvervimab, Lenzilumab, Leronlimab, Lesofavumab, Letolizumab, Levilimab, Lexatumumab, Lifastuzumab, Ligelizumab, Lilotomab, Lintuzumab, Lirilumab, Lodelcizumab, Lokivetmab, Loncastuximab, Lorukafusp, Lorvotuzumab, Losatuxizumab (Serclutamab), Lucatumumab, Lulizumab, Lumiliximab, Lumretuzumab, Lupartumab, Lutikizumab, Maftivimab, Magrolimab, Margetuximab, Marstacimab, Matuzumab, Mavrilimumab, Mepolizumab, Milatuzumab, Mirikizumab, Mirvetuximab, Mitazalimab (Vanalimab), Modotuximab, Mogamulizumab, Monalizumab, Mosunetuzumab, Motavizumab, Moxetumomab, Murlentamab, Muromonab (Zolimomab), Namilumab, Naptumomab, Naratuximab, Narnatumab, Natalizumab, Navivumab, Navicixizumab, Naxitamab, Necitumumab, Nemolizumab, Nesvacumab, Netakimab, Nidanilimab, Nimacimab, Nimotuzumab, Nirsevimab, Nivolumab, Obexelimab, Obiltoxaximab, Obinutuzumab (Afutuzumab), Ocaratuzumab, Ocrelizumab, Ofatumumab, Olaratumab, Oleclumab, Olendalizumab, Olinvacimab (Tanibirumab), Olokizumab, Omalizumab, Omburtamab, Onartuzumab, Ontamalimab, Ontuxizumab, Onvatilimab, Opicinumab, Oportuzumab, Orilanolimab, Orticumab, Osocimab, Otelixizumab, Otilimab, Otlertuzumab, Oxelumab, Ozanezumab, Ozoralizumab, Pabinafusp, Palivizumab, Pamrevlumab, Panitumumab, Panobacumab, Parsatuzumab, Pasotuxizumab, Pateclizumab, Patritumab, Pembrolizumab (Lambrolizumab), Pepinemab, Perakizumab, Pertuzumab, Pidilizumab, Pinatuzumab, Placulumab, Plamotamab, Plozalizumab, Polatuzumab, Ponezumab, Porgaviximab, Prasinezumab, Prezalumab, Pritoxaximab, Prolgolimab, Quetmolimab, Quilizumab, Racotumomab, Radretumab (Bifikafusp/Onfekafusp), Rafivirumab, Ralpancizumab, Ramucirumab, Ranevetmab, Ranibizumab, Ravagalimab, Ravulizumab, Refanezumab, Relatlimab, Relfovetmab, Remtolumab, Reslizumab, Rilotumumab, Rinucumab, Risankizumab, Rituximab, Rivabazumab, Robatumumab, Roledumab, Rolinsatamab, Romilkimab, Romosozumab, Rontalizumab, Rosmantuzumab, Rovalpituzumab, Rozanolixizumab, Rozipafusp, Ruplizumab, Sacituzumab, Samalizumab, Samrotamab, Sarilumab, Satralizumab (Sapelizumab), Secukinumab, Selicrelumab Semorinemab, Seribantumab, Setoxaximab, Setrusumab, Sifalimumab, Siltuximab, Simtuzumab, Sintilimab, Sirtratumab, Sirukumab, Sofituzumab, Solanezumab, Solitomab, Spartalizumab, Spesolimab, Suptavumab, Sutimlimab, Suvizumab, Suvratoxumab, Tabalumab, Tabituximab, Tadocizumab, Tafasitamab, Talacotuzumab, Tamrintamab, Tamtuvetmab, Tanezumab, Tarextumab, Tavolimab (Tavolixizumab), Tebentafusp, Teclistamab, Telisotuzumab, Temelimab, Tenatumomab, Teplizumab, Tepoditamab, Teprotumumab, Tesidolumab, Tezepelumab, Tibulizumab, Tidutamab, Tigatuzumab, Tilavonemab, Tildrakizumab, Timolumab, Tiragolumab, Tislelizumab, Tisotumab, Tocilizumab, Tomaralimab, Tomuzotuximab, Toripalimab, Tosatoxumab, Tovetumab, Tralokinumab, Trastuzumab (Timigutuzumab), Tregalizumab, Tremelimumab (Ticilimumab), Trevogrumab, Ublituximab, Ulocuplumab, Urelumab, Ustekinumab, Utomilumab, Vadastuximab, Valanafusp, Vantictumab, Vanucizumab, Varisacumab, Varlilumab, Vatelizumab, Vedolizumab, Veltuzumab, Vesencumab, Vibecotamab, Visilizumab, Vobarilizumab, Vofatamab, Volagidemab, Vonlerolizumab (Pogalizumab), Vopratelimab, Vorsetuzumab, Vunakizumab, Xentuzumab, Zalifrelimab, Zalutumumab, Zampilimab, Zanolimumab, Zenocutuzumab, Zolbetuximab (Claudiximab), and any combinations of variable light and/or variable heavy chain sequences of any of these antibodies. The amino acid sequences of the heavy chain and light chain variable regions of the above antibodies are available on the IMGT website (see Worldwide Website: imgt.org and are also provided in the attached sequence listing and Table 2).

[0104] In further embodiments, any variable region of any antibody discovered in the art at any time following the instant disclosure can be included in the CAR constructs of the instant invention because, based on the instant disclosure, a person or ordinary skill in the art can employ routine methodology to incorporate the variable region sequences into the CAR constructs and generate CAR-T cells according to the instant invention.

[0105] In preferred embodiments, the single chain variable fragment of a cell-binding antibody that is used in the construction of a CAR of the instant invention is a fragment that binds to a membrane proximal region of a target antigen such that the binding of the CAR generated from such binding fragment is efficient in physically blocking dimerization of the target antigen with any dimerization partner.

[0106] In some embodiments, the antigen binding fragment of the CAR of the invention is derived from a designed ankyrin repeat protein that binds an antigen on a target cell. Binding fragments of designed ankyrin repeat proteins useful in the CARs of the invention can contain between 1 and 20, preferably between 2 and 6, ankyrin repeats comprising both framework sequences and variable sequences and can be retrieved from ankyrin repeat protein libraries. Advantageously, ankyrin repeat proteins bind desirable target molecules on the cell surface of a target cell, have a high stability and low antigenicity, thus lowering the risk for adverse side effects.

[0107] The CARs of the instant invention comprise at least one cytoplasmic domain and/or intracellular signaling domain that activate at least one of the normal effector functions of the T cell in which the CAR is expressed. As used herein, the term “intracellular signaling domain” refers to the portion of a protein that transduces the effector function signal and directs the cell to perform a specialized function. The term “effector function” refers to a specialized function of a T cell. Effector function of a T cell can be, e.g., cytotoxic and immune-stimulatory activities including the secretion of inflammatory cytokines.

[0108] In some embodiments, the CARs of the invention further comprise a transmembrane domain. In preferred embodiments, the transmembrane domain is fused to an extracellular antigen-binding domain of the CAR. In certain embodiments, the transmembrane domain is derived from a molecule whose transmembrane domain is naturally associated with one of the domains of the CAR of the invention. In certain embodiments, the transmembrane domain is modified (such as by amino acid substitutions) to avoid binding to the transmembrane domains of other cell membrane molecules to minimize undesirable interactions with other membrane-associated molecules.

[0109] The transmembrane domain may be derived either from natural or synthetic sources. In some embodiments, the source is natural and the domain may be derived from any membrane-bound or transmembrane protein. Transmembrane regions useful according to the present invention can be derived from, or can comprise, at least one of the transmembrane region(s) of the alpha, beta or zeta chain of the T-cell receptor, CD4, CD8-alpha, CD28, CD3 epsilon, CD3-zeta, CD45, CD5, CDS, CD9, CD16, CD22, CD33, CD37, CD64, CD80, CD86, CD134, CD137, CD 154 and/or ICOS (inducible T-cell stimulator).

[0110] In some embodiments, the transmembrane domain useful according to the instant invention can be synthetic, and can comprise predominantly hydrophobic residues such as leucine and valine. Preferably, the N- and/or C-terminals of a synthetic transmembrane domain comprise a triplet of phenylalanine, tryptophan, and valine.

[0111] Optionally, the transmembrane domain and the intracellular signaling domain of the CAR of the invention can be linked by a short oligo- or polypeptide spacer, preferably between 2 and 10 amino acids in length.

[0112] As used herein, the terms “spacer” or “linker” mean any oligo- or polypeptide that functions to link the transmembrane domain to the extracellular domain or the intracellular domain in the polypeptide chain. A spacer may comprise up to 300 amino acids, preferably 10 to 100 amino acids, more preferably 25 to 50 amino acids, most preferably 5 to 20 amino acids.

[0113] The NS3/4A protease domains of the CARs of the instant invention cleave specific cleavage sites. In some embodiments, the cleavage site is a decapeptides comprising, e.g., six amino acids on the N-terminal side of the cleavage side and four resides on the C-terminal site. In other embodiments, the cleavage sites comprise between 1 and 100 amino acids and any number of amino acids in between and are cleaved at any location within the cleavage site peptide.

[0114] In preferred embodiments, the cleavage sites of the CARs of the invention comprise the amino acids DLEVVT/STWV; DEMEEC/SQHL; ECTTPC/SGSW; and/or EDVVCC/SMSY, wherein “/” indicates the cleaved peptide bond.

[0115] In preferred embodiments, the NS3/4A protease domain of the CARs of the instant invention is located between the single chain variable fragment and the hinge region,

[0116] In other embodiments, the NS3/4A protease domain of the CAR is located between the hinge region and the transmembrane domain. In yet other embodiments, the NS3/4A protease domain is located between the intracellular domains, e.g., between the CD28 domain and the 4-1BB domain, between the CD28 domain and the CD3-zeta domain; between the 4-1BB domain and the CD3-zeta domain; or within any portion of the CAR of the invention as long as its presence does not interfere with the expression, membrane location and/or function of the CAR.

[0117] In preferred embodiments, the CAR of the instant invention comprises a single NS3/4A cleavage site. In other preferred embodiments, the CAR of the instant invention comprises more than one NS3/4A cleavage site.

[0118] In preferred embodiments, the single NS3/4A cleavage site of the CAR of the instant invention is located at or adjacent to the N-terminus of the NS3/4A protease domain.

[0119] In other preferred embodiments, the single NS3/4A cleavage site of the CAR of the instant invention is located at or adjacent to the C-terminus of the NS3/4A protease domain.

[0120] In more preferred embodiments, the CAR of the invention comprises more than one NS3/4A cleavage site and at least one NS3/4A cleavage site is located at or adjacent to the N-terminus of the NS3/4A protease domain.

[0121] In further preferred embodiments, the CAR of the invention comprises more than one NS3/4A cleavage site and at least one NS3/4A cleavage site is located at or adjacent to the C-terminus of the NS3/4A protease domain.

[0122] In most preferred embodiments, the CAR of the invention comprises more than one NS3/4A cleavage site and at least one NS3/4A cleavage site is located at or adjacent to the N-terminus of the NS3/4A protease domain and at least one cleavage site is located at or adjacent to the C-terminus of the NS3/4A protease domain.

[0123] In further embodiments, the NS3/4A cleavage site(s) are located at any position within the CAR of the invention as long as their presence does not interfere with the expression, membrane location and/or function of the CAR.

[0124] In some embodiments, the NS3/4A protease of the CAR of the instant invention comprises a mutation, including an insertion, deletion or substitution of at least one amino acid within the NS3 and/or 4A domain sequence and/or cleavage site.

[0125] Although the at least one mutation can occur at any amino acid position within the NS3 and/or NS3/4A protease domain, preferred positions are amino acids 36, 43, 54, 80, 122, and 168 (numbering starting at A in position 1 of the HCV NS3 protease domain).

[0126] In some embodiments, the NS3/4A protease domain of the CAR of the invention comprises the amino acids sequence of the wild-type HCV NS3/4A protease domain (see, SEQ ID NO: 980).

[0127] In some embodiments, the NS3/4A protease domain of the CAR of the invention comprises a T54A substitution in the HCV NS3/4A protease domain (see, SEQ ID NO: 981).

[0128] In some embodiments, the NS3/4A protease domain of the CAR of the invention comprises a single cleavage site at or adjacent to the NS4A sequence of the NS3/4A protease domain.

[0129] In some embodiments, the NS3/4A protease domain of the CAR of the invention comprises a single cleavage site at or adjacent to the C-terminus of the CD8 hinge of the CAR construct of the invention.

[0130] In some embodiments, the NS3/4A protease domain of the CAR of the invention comprises at least one amino acid substitution that renders the NS3/4A protease of the invention sensitive to inhibition by a small molecule inhibitor. In a preferred embodiment, the NS3/4A protease domain of the CAR of the invention comprises at least one mutation that renders the NS3/4A protease sensitive for inhibition by asunaprevir (see, SEQ ID NO: 982).

[0131] In some embodiments, the NS3/4A protease domain of the CAR of the invention comprises at least one amino acid substitutions that render the NS3/4A protease of the invention sensitive to inhibition by the small molecule inhibitor telaprevir (see, SEQ ID NO: 983).

[0132] In preferred embodiments, the CAR of the instant invention comprises at least one NS3/4A protease domain that is inhibited in its protease activity by a small molecule inhibitor including, but not limited to, asunaprevir, telaprevir, simeprevir, faldaprevir, danoprevir, vaniprevir, narlaprevir/r, MK-5172, ABT-450/r, ACH-1625, ACH-2684, GS-9256, GS-9451, and IDX320.

[0133] Advantageously, the CARs of the invention are cleaved by the NS3/4A protease domain at the specific cleavage site(s) in the absence of a small molecule inhibitor. In contrast the CARs of the invention comprising at least one mutation in the NS3/4A protease domain that renders the NS3/4A domain sensitive to the binding of and inhibition by a small inhibitor molecule can be inhibited by contacting the T cell transduced with such CAR construct of the instant invention with an effective amount of the small molecule inhibitor.

[0134] As used herein, “an effective amount” of a small molecule inhibitor is any amount that results in the presence of CARs on the cell membrane of a cell transduced with a CAR construct of the invention.

[0135] When used in the context of the treatment or prevention of a disease, the term “effective amount,” as used herein, refers to an amount that is capable of treating or ameliorating a disease or condition or otherwise capable of producing an intended therapeutic effect (such as preventing or reducing the level of an auto-reactive cell).

[0136] For example, a therapeutically effective amount of CAR-T cells to be administered to a subject in need thereof can range from about 10 to about 10¹⁴ cells per administration, including but not limited to, about 10² to about 10¹³′ about 10³ to about 10¹², about 10⁴ to about 10¹¹, about 10⁵ to about 10¹⁰, about 10⁶ to about 10⁹, and any number in between, e.g., 1×10², 1.1×10², 1.2×10², 1.3×10², 1.4×10², 1.5×10², 1.6×102, 1.7×10², 1.8×10², 1.9×10², and 2×210² and so on.

[0137] The term “treatment” or any grammatical variation thereof (e.g. treat, treating, and treatment etc.), as used herein, includes but is not limited to, ameliorating or alleviating a symptom of a disease or condition, reducing, suppressing, inhibiting, lessening, or affecting the progression, severity, and/or scope of a condition.

[0138] The term “prevention” or any grammatical variation thereof (e.g., prevent, preventing, and prevention etc.), as used herein, includes but is not limited to, delaying the onset of symptoms, preventing relapse to a disease, decreasing the number or frequency of relapse episodes, increasing latency between symptomatic episodes, or a combination thereof.

[0139] In some embodiments, a mixed population of cells is extracted from a patient with a disease that is to be treated with the CAR-T cells of the invention or a donor subject. Subsequently, retrovirus- or lentivirus-mediated expression of a CAR of the invention in the isolated T cells is performed, and a therapeutically effective amount of CAR-T cells ranging from 1 to 10¹⁴ CAR-T cells are transfused into the patient. The CAR-T cells of the invention are able to replicate in vivo resulting in long-term persistence that can lead to sustained disease control. For example, the transfused CAR-T cells can persist in a patient for at least one month after administration. In some embodiments, the persisting population of genetically engineered CAR-T cells persists in the human for at least four months, five months, six months, seven months, eight months, nine months, ten months, eleven months, twelve months, two years, or three years after administration.

[0140] Further provided are dual switch CAR-T cell systems comprising T cells transduced with at least one CAR construct encoding a CAR having a single chain variable fragment that binds to a first antigen and T cells transduced with at least one CAR construct encoding a CAR having a single chain variable fragment that binds to a second antigen.

[0141] In some embodiments, the CAR constructs encoding a scFv that bind a first and a scFv that bind a second antigen are combined within a single vector and transferred into the same T cell.

[0142] In other embodiments, the CAR constructs encoding a scFv that binds a first and a scFv that binds a second antigen are contained on separate vectors and are transferred into different T cells.

[0143] In a preferred embodiment, the CAR encoding a scFv that binds to a first antigen comprises a NS3/4A protease domain that contain at least one mutation that renders the NS3/4A domain sensitive to inhibition with a small molecule inhibitor.

[0144] In a further preferred embodiment, the CAR encoding a scFv that binds to a second antigen comprises a NS3/4A protease domain that contain at least one mutation that renders the NS3/4A domain sensitive to inhibition with a different small molecule inhibitor.

[0145] In more preferred embodiments, the CAR constructs encoding a scFv that bind a first and a scFv that bind a second antigen comprise NS3/4A protease domains that are sensitive to inhibition by different small molecule inhibitors.

[0146] In most preferred embodiments, a first CAR construct of the invention encodes a scFv that binds a CD19 antigen and comprises a NS3/4A protease domain that is sensitive to inhibition by the small molecule inhibitor asunaprevir and a second CAR construct encodes a scFv that binds a CD22 antigen and comprises a NS3/4A protease domain that is sensitive to inhibition by the small molecule inhibitor telaprevir.

[0147] For example, in some embodiments, lentiviral vectors are constructed that encode both a switchable anti-CD19 CAR and a switchable anti-CD22 CAR (see, e.g., expression vector plasmid pLVX) using different variants of NS3/4A protease switches, which different NS3/4A variants are inhibited by different small molecule inhibitors. Co-expression of two CARs from a single lentivirus expression plasmid is achieved, e.g., by a self-cleaving viral 2A peptide sequence. Each CAR includes, e.g., a CD28 and 4-1-BB costimulatory domain in addition to a CD3 zeta activating domain (third-generation). The lentiviruses are packaged in 293T cells by co-transfecting an expression vector with a lentiviral envelope plasmid, e.g., plasmid pPAX2 and a lentiviral packaging plasmid, e.g., pMD2.G into 293T cells and the lentiviruses made by the transfected 293T cells are harvested. The lentiviruses thus produced comprise an anti-CD19 CAR construct and an anti-CD22 CAR construct and are used to transduce T cells obtained from patients in need of CAR-T therapy or T cells obtained from donors. The CAR-T cells are subsequently administered to the patient in need of CAR-T cell therapy by infusion.

[0148] Advantageously, the CAR-T cells of the instant invention when cultured in the absence of a small molecule inhibitor, e.g., asunaprevir do not express the CAR on the cell surface as measured by antibodies against the CD19-CAR and flow cytometry.

[0149] However, in the presence of asunaprevir, a significant portion of T cells express on their cell surface the CAR of the invention as measured by flow cytometry.

[0150] Furthermore, the expression levels of CARs of the invention present on the cell surface of transduced T cells increase with exposure of said T cells to increasing concentrations of asunaprevir.

[0151] The expression levels of CARs on CAR-T cells in the presence of asunaprevir are stable over time. For example, the expression levels are stable for at least 1 hour to about 4 weeks, e.g. for 2 hours, 4 hours, 6 hours, 8 hours. 10 hours, 12 hours, 14 hours, 16 hours, 18 hours, 20 hours, 24 hours. 30 hours. 36 hours, 40 hours, 48 hours, 72 hours, 96 hours, 120 hours, 144 hours, 1 week, 2, weeks, 3 weeks, and/or 4 weeks.

[0152] Importantly, the presence of a NS3/4A protease domain in the CAR of the instant invention does not have any negative effect on the killing ability of the T cells expressing the CARs of the invention. For example, the tumoricidal or cancer cell killing activity of T cells expressing a CAR without a NS3/4A protease domain is similar to the tumoricidal activity of CAR-T cells of the invention, which CAR-T cells express a NS3/4a protease domain.

[0153] Advantageously, when the small molecule inhibitor is withdrawn, the expression levels of CARs of the invention on the cell surface of CAR-T cells are significantly reduced or CARs are absent from the surface of inhibitor-treated CAR-T cells.

[0154] For example, withdrawal of asunaprevir for 24 hours results in a significant reduction of CARs on the surface of CAR-T cells and withdrawal of asunaprevir for 48 hours results in an absence of CARs on CAR-T cells.

[0155] However, CAR-T cells of the invention do not undergo apoptotic cell death, necrotic cells death, and/or autophagy in the presence or absence of the small molecule inhibitor.

[0156] Furthermore, CAR-T cells of the invention do not alter their CD4 and/or CD8 expression levels in the presence or absence of the small molecule inhibitor.

[0157] The efficient removal of CARs from the surface of CAR-T cells enables a return of the CAR-T cells of the invention to a non-activated state. Because extensive activation of T cells, in general, and CAR-T cells specifically leads to cell death and, thus, exhaustion of the CAR-T cell population, the on/off switches of the CARs of the instant invention provide for extended viability of CAR-T cells in patients and avoid activation-induced cell death and CAR-T cell exhaustion.

[0158] Nucleic Acid Molecules, Vectors, and Expression Constructs

[0159] In some embodiments, the instant invention provides nucleic acid molecules encoding antigen-specific CARs of the invention. The present invention also provides expression constructs and vectors comprising nucleic acid molecules encoding antigen-specific CARs of the invention.

[0160] In preferred embodiments, the CAR sequences are contained in a genetic construct that allows site-directed insertion of the CAR construct into the T cell genome to allow more consistent surface level expression of the CARs.

[0161] The nucleic acid sequences useful according to the instant invention can be obtained using recombinant methods known in the art, such as, e.g., by screening libraries from cells expressing a gene of interest, by deriving a gene of interest from a vector known to include the same, or by isolating directly from cells and tissues containing the same. Alternatively, the nucleic acid sequences of interest can be produced synthetically.

[0162] The expression of natural or synthetic nucleic acids encoding CARs can be achieved by operably linking a nucleic acid encoding the CAR polypeptide or portions thereof to a promoter, and incorporating the construct into an expression vector. The vectors can be suitable for replication and integration in eukaryotes. Typical cloning vectors contain initiation sequences, promoters useful for regulation of the expression of the desired nucleic acid sequence, and transcription and translation terminators.

[0163] As used herein, the term “expression construct” refers to a combination of nucleic acid sequences that provides for transcription of an operably linked nucleic acid sequence. Expression constructs of the invention also generally include regulatory elements that are functional in the intended host cell in which the expression construct is to be expressed. Regulatory elements include promoters, transcription termination sequences, translation termination sequences, enhancers, and polyadenylation elements.

[0164] An expression construct of the invention can comprise a promoter sequence operably linked to a polynucleotide sequence encoding a peptide of the invention. Promoters can be incorporated into a polynucleotide using standard techniques known in the art. Multiple copies of promoters or multiple promoters can be used in an expression construct of the invention. In preferred embodiments, a promoter can be positioned about the same distance from the transcription start site as it is from the transcription start site in its natural genetic environment. Some variation in this distance is permitted without substantial decrease in promoter activity. A transcription start site is typically included in the expression construct.

[0165] As used herein, the term “operably linked” refers to a juxtaposition of the components described wherein the components are in a relationship that permits them to function in their intended manner. In general, operably linked components are in contiguous relation. Sequence(s) operably-linked to a coding sequence may be capable of effecting the replication, transcription and/or translation of the coding sequence. For example, a coding sequence is operably-linked to a promoter when the promoter is capable of directing transcription of that coding sequence.

[0166] A “coding sequence” or “coding region” is a polynucleotide sequence that is transcribed into mRNA and/or translated into a polypeptide. For example, a coding sequence may encode a polypeptide of interest. The boundaries of the coding sequence are determined by a translation start codon at the 5′-terminus and a translation stop codon at the 3′-terminus.

[0167] The term “promoter,” as used herein, refers to a DNA sequence operably linked to a nucleic acid sequence to be transcribed such as a nucleic acid sequence encoding a desired molecule. A promoter is generally positioned upstream of a nucleic acid sequence to be transcribed and provides a site for specific binding by RNA polymerase and other transcription factors. In specific embodiments, a promoter is generally positioned upstream of the nucleic acid sequence transcribed to produce the desired molecule, and provides a site for specific binding by RNA polymerase and other transcription factors.

[0168] In certain embodiments, promoters useful according to the current invention include, but are not limited to, cytomegalovirus (CMV) promoter, elongation growth factor-1a (EF-1a) promoter, simian virus 40 (SV40) early promoter, mouse mammary tumor virus (MMTV), human immunodeficiency virus (HIV) long terminal repeat (LTR) promoter, MoMuLV promoter, an avian leukemia virus promoter, an Epstein-Barr virus immediate early promoter, a Rous sarcoma virus promoter, actin promoter, myosin promoter, hemoglobin promoter, and creatine kinase promoter.

[0169] Vectors useful according to the present invention include, but are not limited to, viral vectors, including but not limited to, retroviral vectors, adenoviral vectors, adeno-associated viral vectors (AAV), and lentiviral vectors.

[0170] In preferred embodiments, lentiviral vectors are provided that comprise a nucleic acid molecule encoding a CAR specific for a cancer antigen or immune disease antigen. If the CAR constructs of the invention have a size in excess of the packaging capacity of a viral vector, alternative methods including, but not limited to, piggyBac transposon systems can be used to transfer CAR constructs into target cells.

[0171] Transduction, Isolation, and Enrichment of T Cells

[0172] In some embodiments, T cells are transduced using a variety of viral vectors, including but not limited to, retroviral vectors, adenoviral vectors, adeno-associated viral vectors, and lentiviral vectors. In some embodiments, the viral vector comprises a nucleic acid molecule encoding a CAR of the present invention.

[0173] The term “transfected” or “transformed” or “transduced,” as used herein, refers to a process by which exogenous nucleic acid is transferred or introduced into a host cell.

[0174] In some embodiments, the instant invention provides the use of lentiviral vectors for transduction of T cells. Vectors derived from lentivirus are suitable tools to achieve long-term gene transfer since they allow long-term, stable integration of a transgene and its propagation in daughter cells. Lentiviral vectors have the added advantage over vectors derived, e.g., from retroviruses such as murine leukemia viruses in that they can transduce non-proliferating cells. Lentiviral vectors also have the added advantage of low immunogenicity.

[0175] Selected genes can be inserted into a vector and packaged in a virus (such as lentivirus) particle using techniques known in the art. The recombinant virus can then be isolated and delivered to cells, e.g., T cells of a subject either in vivo or ex vivo. In some embodiments, the lentivirus vectors of the invention comprise nucleic acid molecules encoding CARs of the instant invention.

[0176] In some embodiments, in order to assess the expression of a CAR polypeptide or portions thereof, the expression vector to be introduced into a cell can also contain either a selectable marker gene or a reporter gene. Reporter genes are used for identifying potentially transfected and/or infected cells and for evaluating the functionality of regulatory sequences. In general, a reporter gene is a gene that is not present in or expressed by the recipient organism or tissue and that encodes a polypeptide whose expression is manifested by some easily detectable property, e.g., enzymatic or fluorescent activity. Expression of the reporter gene is assayed at a suitable time after the DNA has been introduced into the recipient cells. Suitable reporter genes include, but are not limited to, genes encoding luciferase, beta-galactosidase, chloramphenicol acetyl transferase, secreted alkaline phosphatase, and any fluorescent protein gene such as, e.g., green fluorescent protein. Suitable expression systems are well known in the art and may be prepared using techniques known in the art or may be obtained commercially.

[0177] The term “activation” or any grammatical variation thereof (e.g., activate, activating, activation etc.), as used herein, refers to the state of a T cell that has been sufficiently stimulated to induce detectable cellular proliferation. Activation can also be associated with induced cytokine production, and detectable effector functions.

[0178] The term “activated T cell,” as used herein, refers to, among other things, T cells that are undergoing cell division.

[0179] In one embodiment, prior to expansion and genetic modification of the T cells of the invention, a source of T cells can be obtained from a subject.

[0180] The term “isolating” or any grammatical variation thereof (e.g., isolate, isolating, isolation etc.), as used herein, refers to a cell that is removed from its natural environment (such as in peripheral blood) and is separated from the combined mixture of the blood to be at least about 75% free, and most preferably about 90% free, from other cells with which it is naturally present, but which lack the cell surface markers based on which the cells were isolated.

[0181] T cells can be obtained from a number of sources, including, but not limited to, peripheral blood mononuclear cells, bone marrow, lymph node tissue, cord blood, thymus tissues, tissues from sites of infection, ascites, pleural effusions, spleen tissues, and tumors. In certain embodiments of the present invention, any number of T cell lines available in the art, may be used.

[0182] In preferred embodiments, T cells are isolated and purified from blood or bone marrow of a subject into which the CAR-T cell-enriched composition is subsequently introduced. The subject can be a cancer patient or a patient suffering from an immune-related disease in whom suppression of an immune response against an immune cell-related antigen is desired. In some embodiments, the subject is a human afflicted with cancer or an auto-immune disease.

[0183] Alternatively, the T cells may be obtained from a donor distinct from the patient. In certain embodiments, T cells may be obtained from a unit of blood collected from a subject using any number of techniques known to the skilled artisan, such as Ficoll™ separation. In preferred embodiments, cells from the circulating blood of an individual are obtained by apheresis. The apheresis product typically contains lymphocytes, including T cells, monocytes, granulocytes, B cells, other nucleated white blood cells, red blood cells, and platelets.

[0184] In some embodiments, the cells collected by apheresis or Ficoll™ separation may be washed to remove the plasma fraction and to place the cells in an appropriate buffer or media for subsequent processing steps. In further embodiments, the cells are washed with phosphate buffered saline (PBS). In an alternative embodiment, the wash solution lacks calcium and may lack magnesium or may lack many, if not all, divalent cations. As those of ordinary skill in the art would readily appreciate a washing step may be accomplished by methods known to those in the art, such as by using a semi-automated “flow-through” centrifuge (for example, the Cobe 2991 cell processor, the Baxter CytoMate, or the Haemonetics Cell Saver 5) according to the manufacturer's instructions. After washing, the cells may be resuspended in a variety of biocompatible buffers, such as, e.g., Ca²⁺-free, Mg²⁺-free PBS, PlasmaLyte A, autoMACS Running Buffer or other saline solution with or without buffer. For example, autoMACS Running Buffer contains bovine serum albumin (BSA) and 0.09% azide. Alternatively, the undesirable components of the apheresis sample may be removed and the cells directly resuspended in culture media.

[0185] The harvested lymphocytes may be separated using the cell separation techniques based on T cell-specific cell markers such as those described herein. By selecting for phenotypic characteristics among the cells obtained from the blood sample, antibodies that recognize species-specific varieties of markers are used to enrich for and select T cells. For example, antibodies that recognize the species-specific varieties of CD4, CD25, and CD45RA, and other markers known in the art are used to enrich for or isolate T cells from a human (e.g., antibody to a human CD4 for human T cells).

[0186] In particular embodiments, the T cells are enriched from a population of cells using reagents that bind cell surface markers specific for T cells and separating these cells using cell sorting assays such as fluorescence-activated cell sorting (FACS), solid-phase magnetic beads, etc., as known in the art. In some embodiments, combinations of methods to sort the cells can be used, e.g., magnetic selection, followed by FACS. To enhance enrichment, positive selection, e.g., using surface markers that are expressed on T cells is combined with negative selection, e.g., using surface markers that are not expressed on T cells. It is intended that isolation/enrichment of T cells using cell surface markers can be performed in any order. Therefore, a positive selection step may immediately precede a negative selection step, or vice versa. It is also contemplated that isolation/enrichment be performed by grouping the positive selection and negative selection steps. Therefore, isolation/enrichment is done by first performing the positive selection steps of the method, followed by performing the negative selection steps of the method, or vice versa.

[0187] It is also possible to enrich for CD4⁺ and CD8⁺ cells by depleting non-CD4⁺ and non-CD8⁺ immune cells. Such cell types include, but are not limited to, B cells, natural killer cells, dendritic cells, monocytes, granulocytes and erythroid cells. Antibodies to surface markers that can used to deplete non-CD4⁺ and non-CD8⁺ cells are known in the art and include, but are not limited to, CD14, CD16, CD19, CD36, CD56, CD123, and glycophorin A.

[0188] For example, in one embodiment of the invention, a population of cells is first contacted with a first reagent or group of reagents that bind one or more of CD14, CD16, CD19, CD36, CD56, CD123, and glycophorin A, followed by reagents that respectively bind CD4 and/or CD8 and/or CD45RA.

[0189] Whether prior to or after genetic modification of the T cells to express a desirable CAR, the T cells can be activated and expanded generally using methods as known in the art.

[0190] Generally, the CAR-T cells of the invention are expanded by contact with a surface having attached thereto an agent that stimulates a CD3 TCR complex associated signal and a ligand that stimulates a costimulatory molecule on the surface of the T cells. In particular, T cell populations may be stimulated as described herein, such as by contact with an anti-CD3 antibody, or antigen-binding fragment thereof, or an anti-CD3 antibody immobilized on a surface, or by contact with a protein kinase C activator (e.g., bryostatin) in conjunction with a calcium ionophore. For costimulation of an accessory molecule on the surface of T cells, a ligand that binds the accessory molecule is used. For example, a population of T cells can be contacted with anti-CD3 and anti-CD28 antibodies under conditions appropriate for stimulating proliferation of T cells.

[0191] In certain embodiments, the primary stimulatory signal and the costimulatory signal for the T cells may be provided by different protocols. For example, the agents providing each signal may be in solution or coupled to a surface. When coupled to a surface, the agents may be coupled to the same surface (i.e., in “cis” formation) or to separate surfaces (i.e., in “trans” formation). Alternatively, one agent may be coupled to a surface and the other agent may be in solution. In one embodiment, the agent providing the costimulatory signal is bound to a cell surface and the agent providing the primary activation signal is in solution or coupled to a surface. In certain embodiments, both agents can be in solution. In other embodiments, the agents may be in soluble form, and then cross-linked to a surface, such as a cell expressing Fc receptors or an antibody or other binding agent which will bind to the agents.

[0192] In some embodiments, two agents are immobilized on beads, either on the same bead, i.e., “cis,” or to separate beads, i.e., “trans.” By way of example, the agent providing the primary activation signal is an anti-CD3 antibody or an antigen-binding fragment thereof and the agent providing the costimulatory signal is an anti-CD28 antibody or antigen-binding fragment thereof; and both agents are co-immobilized to the same bead in equivalent molecular amounts. In one embodiment, a 1:1 ratio of each antibody bound to the beads for T cell expansion and T cell growth is used. In certain aspects of the present invention, a ratio of anti CD3:CD28 antibodies bound to the beads is used such that an increase in T cell expansion is observed as compared to the expansion observed using a ratio of 1:1.

[0193] In some embodiments, the ratio of CD3:CD28 antibody bound to the beads ranges from 100:1 to 1:100 and all integer values there between. In some embodiments of the invention, more anti-CD28 antibodies are bound to the particles than anti-CD3 antibody such that the ratio of CD3:CD28 is less than one.

[0194] In certain embodiments, the ratio of anti-CD28 antibody to anti-CD3 antibody bound to the beads is greater than 2:1. In one particular embodiment, a 1:100 CD3:CD28 ratio of antibody bound to beads is used. In another embodiment, a 1:75 CD3:CD28 ratio of antibody bound to beads is used. In a further embodiment, a 1:50 CD3:CD28 ratio of antibody bound to beads is used. In another embodiment, a 1:30 CD3:CD28 ratio of antibody bound to beads is used. In one preferred embodiment, a 1:10 CD3:CD28 ratio of antibody bound to beads is used. In another embodiment, a 1:3 CD3:CD28 ratio of antibody bound to the beads is used. In yet another embodiment, a 3:1 CD3:CD28 ratio of antibody bound to the beads is used.

[0195] Ratios of particles to cells can range from 1:500 to 500:1 and any integer values in between may be used to stimulate T cells or other target cells. As those of ordinary skill in the art can readily appreciate, the ratio of particles to cells may depend on particle size relative to the target cell. For example, small sized beads could only bind a few cells, while larger beads could bind many. In certain embodiments the ratio of cells to particles ranges from 1:100 to 100:1 and any integer values in-between and in further embodiments the ratio comprises 1:9 to 9:1 and any integer values in between, can also be used to stimulate T cells. In another embodiment, particles are added on a daily or every other day basis. One of skill in the art will appreciate that a variety of other ratios may be suitable for use in the present invention. In particular, ratios can vary depending on particle size.

[0196] In further embodiments, the T cells are combined with agent-coated beads and beads and cells are subsequently separated, and then the separated cells are cultured. In an alternative embodiment, prior to culture, the agent-coated beads and cells are not separated but are cultured together. In a further embodiment, beads and cells are first concentrated by application of a force, such as a magnetic force, resulting in increased ligation of cell surface markers, thereby inducing cell stimulation.

[0197] In some embodiments, the mixture of agent-coated beads and cells may be cultured for several hours (about 3 hours) to about 21 days or any hourly integer value in between. In preferred embodiments beads and T cells are cultured together for about eight days. In other preferred embodiments, beads and T cells are cultured together for 2-3 days. Several cycles of stimulation may also be desired such that culture time of T cells can be 60 days or more.

[0198] Conditions appropriate for T cell culture include an appropriate media (e.g., Minimal Essential Media or RPM1 Media 1640 or, X-vivo 15, (Lonza)) that may contain factors necessary for proliferation and viability, including serum (e.g., fetal bovine or human serum), interleukin-2 (IL-2), insulin, IFN-γ, IL-4, IL-7, GM-CSF, IL-10, IL-12, IL-15, TGFβ, and TNF-α or any other additives for the growth of cells known to the skilled artisan. Other additives for the growth of cells include, but are not limited to, surfactant, plasmanate, and reducing agents such as N-acetyl-cysteine and 2-mercaptoethanol. Media can include RPMI 1640, AIM-V, DMEM, MEM, a-MEM, F-12, X-Vivo 1 5, X-Vivo 20, and Optimizer, with added amino acids, sodium pyruvate, and vitamins, either serum-free or supplemented with an appropriate amount of serum (or plasma) or a defined set of hormones, and/or an amount of cytokine(s) sufficient for the growth and expansion of T cells. Antibiotics, e.g., penicillin and streptomycin, are included only in experimental cultures, not in cultures of cells that are to be infused into a subject. The target cells are maintained under conditions necessary to support growth, e.g., an appropriate temperature (e.g., 37° C.) and atmosphere (e.g., air plus 5% CO₂).

[0199] Antibody and Antibody Domain

[0200] An antibody that is contemplated for use in the present invention can be in any of a variety of forms, including a whole immunoglobulin, an antibody fragment such as Fv, Fab, and similar fragments, as well as a single chain antibody that includes the variable domain complementarity determining regions (CDR), and similar forms, all of which fall under the broad term “antibody,” as used herein.

[0201] The term “human antibody,” as used herein, is intended to include antibodies having variable and constant regions identical to, essentially identical to, or derived from human germ-line immunoglobulin sequences. Such human antibodies can include amino acid residues not encoded by human germline immunoglobulin sequences (e.g., mutations introduced by random or site-specific mutagenesis in vitro or by somatic mutation in vivo). However, the term “human antibody,” as used herein, is not intended to include antibodies in which CDR sequences derived from the germline of another mammalian species, such as a mouse, have been grafted onto human framework sequences.

[0202] The term “antibody fragment” refers to a portion of a full-length antibody, generally the antigen binding or variable region. Examples of antibody fragments include Fab, Fab′, F(ab′)₂ and Fv fragments. Papain digestion of antibodies produces two identical antigen binding fragments, called the Fab fragment, each with a single antigen binding site, and a residual “Fc” fragment, so-called for its ability to crystallize readily. Pepsin treatment of an antibody yields an F(ab′)₂ fragment that has two antigen binding fragments, which are capable of cross-linking antigen, and a residual other fragment (which is termed pFc′). Additional fragments can include diabodies, linear antibodies, single-chain antibody molecules, and multi-specific antibodies formed from antibody fragments. As used herein, “antigen binding fragment” with respect to antibodies, refers to, for example, Fv, F(ab) and F(ab′)₂ fragments. Of particular importance for binding are the first 110 to 130 amino acids at the N-terminus of the amino acid sequences exemplified herein. Thus, high identity in the N-terminus 110, 115, 120, 125, or 130 amino acids constituting the variable region is preferred. Variant sequences preferably have more than 75%, 90%, or even 95% identity in this region.

[0203] Fab is the fragment of an antibody that contains a monovalent antigen-binding fragment of an antibody molecule. A Fab fragment can be produced by digestion of whole antibody with the enzyme papain to yield an intact light chain and a portion of one heavy chain.

[0204] Fab′ is the fragment of an antibody molecule that can be obtained by treating whole antibody with pepsin, followed by reduction, to yield an intact light chain and a portion of the heavy chain. Two Fab′ fragments are obtained per antibody molecule. Fab′ fragments differ from Fab fragments by the addition of a few residues at the carboxyl terminus of the heavy chain CH1 domain including one or more cysteines from the antibody hinge region.

[0205] (Fab′)₂ is the fragment of an antibody that can be obtained by treating whole antibody with the enzyme pepsin without subsequent reduction. F(ab′)₂ is a dimer of two Fab′ fragments held together by two disulfide bonds.

[0206] Fv is the minimum antibody fragment that contains a complete antigen recognition and binding site. This region consists of a dimer of one heavy and one light chain variable domain in a tight, non-covalent association (VH-VL dimer). It is in this configuration that the three CDRs of each variable domain interact to define an antigen-binding site on the surface of the VH-VL dimer. Collectively, the six CDRs confer antigen-binding specificity to the antibody.

[0207] However, even a single variable domain, or half of an Fv, comprising only three CDRs specific for an antigen has the ability to recognize and bind antigen, although potentially at a lower affinity than the entire binding site.

[0208] A single chain antibody is defined as a genetically engineered molecule containing the variable region of the light chain (VL), the variable region of the heavy chain (VH), linked by a suitable polypeptide linker as a genetically fused single chain molecule. Such single chain antibodies are also referred to as “single-chain Fv” or “sFv” antibody fragments. Generally, the Fv polypeptide further comprises a polypeptide linker between the VH and VL domains that enables the sFv to form the desired structure for antigen binding.

[0209] “Specific binding” or “specificity” refers to the ability of an antibody or other agent to detectably bind an epitope presented on an antigen, while having relatively little detectable reactivity with other proteins or structures. Specificity can be relatively determined by binding or competitive binding assays, using, e.g., Biacore instruments. Specificity can be exhibited by, e.g., an about 10:1, about 20:1, about 50:1, about 100:1, 10.000:1 or greater ratio of affinity/avidity in binding to the specific antigen versus nonspecific binding to other irrelevant molecules.

[0210] Strategies for antibody optimization are sometimes carried out using random mutagenesis. In these cases, positions are chosen randomly, or amino acid changes are made using simplistic rules such as a sequential change of all residues to alanine, Alanine scanning mutagenesis can also be used, for example, to map the antigen binding residues of an antibody. Sequence-based methods of affinity maturation may also be used to increase the binding affinities of antibodies.

[0211] Antibodies within the scope of the invention can be of any isotype, including IgG, IgA, IgE, IgD, and IgM. IgG isotype antibodies can be further subdivided into IgG1, IgG2, IgG3, and IgG4 subtypes. IgA antibodies can be further subdivided into IgA1 and IgA2 subtypes.

[0212] Formulations and Administration

[0213] In some embodiments, T cells expressing a CAR of the instant invention are administered to a subject. The term “subject,” as used herein, describes an organism, including a mammal such as a primate. Mammalian species that can benefit from the disclosed methods of treatment include, but are not limited to, apes, chimpanzees, orangutans, humans monkeys; and domesticated and laboratory animals such as dogs, cats, horses, cattle, pigs, sheep, goats, chicken, mice, rats, guinea pigs, and hamsters. In one specific embodiment, the subject is a human.

[0214] In some embodiments, effective amounts of CAR-expressing T cells engineered according to the instant invention are administered to a patient in need of treatment of a disease can be performed using methods well known in the art such as adoptive cell transfer.

[0215] In one embodiment, a mixed population of cells is extracted from a patient with a disease that is to be treated with the CAR-T cells of the invention or a donor subject. Subsequently, retrovirus- or lentivirus-mediated expression of a CAR of the invention in the isolated T cells is performed, and a therapeutically effective amount of CAR-T cells ranging from 1 to 10¹⁴ are transfused into the patient. The CAR-T cells of the invention are able to replicate in vivo resulting in long-term persistence that can lead to sustained disease control. For example, the transfused CAR-T cells can persist in a patient for at least one month after administration. In some embodiments, the persisting population of genetically engineered CAR-T cells persists in the human for at least four months, five months, six months, seven months, eight months, nine months, ten months, eleven months, twelve months, two years, or three years after administration.

[0216] The present invention also provides a pharmaceutical composition comprising one or more CAR-T cells of the present invention. In certain embodiments, the composition comprises at least 1, 10, 10², 10³, 10⁴, 10⁵, 10⁶, 10⁷, 10⁸, 10⁹, 10¹⁰, 10¹¹, 10¹², 10¹³, or 10¹⁴ CAR-T cells, or any amounts higher than 10¹⁴ of CAR-T cells.

[0217] In some embodiments, the persisting population of genetically engineered CAR-T cells comprises at least one cell selected from T cells that had been administered to a human, progenies of T cells that had been administered to a human, and a combination thereof.

[0218] In some embodiments, the CAR-T cells of the invention can undergo robust in vivo T cell expansion. In preferred embodiment, the CAR-T cells of the invention evolve into specific memory T cells that can be reactivated to inhibit any additional tumor cells or immune cells of the disease originally treated with the CAR-T cells.

[0219] In some embodiments, the CAR-T cells of the invention infused into a patient can eliminate cancer cells or immune cells in vivo in patients with cancer or an immune-related disease.

[0220] In some embodiments, the CAR-T cells of the invention infused into a patient can reduce the tumor burden or immunological response in vivo in patients suffering from cancer or an immune-related disease.

[0221] In other embodiments, the CAR-T cells of the invention infused into a patient can prevent the reoccurrence of cancer cells or immune cells that cause an immune disease.

[0222] In yet other embodiments, the CAR-T cells of the invention infused into a patient can prevent the occurrence of a cancer or an immune-related disease in vivo in subjects having a high risk of developing a cancer or an immune-related disease, wherein the risk can be based on prior history of the patient, family history, accumulation of a variety of risk factors or the presence of a precancerous lesion or an immune system alteration that is considered a precursor of an immune-related disease.

[0223] The CAR-T cells of the present invention may be administrated alone, but preferably, as a pharmaceutical composition, which usually comprises a suitable pharmaceutical excipient, diluent or carrier selected according to the intended administration route.

[0224] The CAR-T cells may be administrated to the patient in need thereof by any suitable route. The manner of application may vary widely, e.g., in certain embodiments, the CAR-T cell containing compositions of the invention will be administered intravenously, subcutaneously, peritoneally, intramuscularly and vaginally or at the site of a tumor or an inflammation directly. Regardless, any of the conventional methods for administration of a vaccine are applicable. The dosage of the vaccine will depend on the route of administration and will vary according to the size of the host.

[0225] In one embodiment, the composition of the present invention is administered via injection.

[0226] Some further suitable administration routes include, but are not limited to, oral, rectal, nasal, topical (including buccal and sublingual), subcutaneous, vaginal or parenteral (including subcutaneous, intramuscular, intravenous, intracutaneous, intrathecal and extradural) administration.

[0227] For intravenous injection and injection at the focal site, active ingredients are present in the form of a parenterally-acceptable aqueous solution, which is free of pyrogen and has appropriate pH value, isotonicity and stability.

[0228] A suitable solution may be formulated by the person skilled in the art using, e.g., isotonic excipients such as sodium chloride injection, Ringer's injection, Ringer's lactate injection. As required, preservative, stabilizer, buffering agent, antioxidant and/or some other additives may be added. The pharmaceutical composition orally administrated may be in a form of tablet, capsule, powder or oral liquid etc. Solid carrier, such as gelatin or adjuvant, may be comprised in a tablet. Liquid pharmaceutical composition usually comprises liquid carrier, such as water, petroleum, animal or vegetable oil, mineral oil or synthetic oil. Also included may be normal saline solution, glucose or other sugar solutions or glycols such as ethylene glycol, propylene glycol or polyethylene glycol.

### Materials and Methods

[0229] PBMCs are isolated from blood drawn from donors or from buffy coats obtained from a Blood Bank. Approximately 150 ml donor blood are drawn into heparinized blood collection tubes (VWR, West Chester, Pa.), then diluted 1:1 in PBS. Buffy coats are diluted to a final volume of 200 ml in PBS. Approximately 4 volumes of diluted sample are layered over 3 volumes of Ficoll-Paque PLUS (GE Healthcare Bio-Sciences, Pittsburgh, Pa.), then centrifuged at 800 rcf at room temperature for 30 minutes without brake. Cells at the interface are harvested, washed and resuspended in MACS Buffer for further separation.

[0230] For in vivo animal studies and in vitro experiments, cell lines, including, but not limited to, Raji, K562, Nalm-6, 293T are purchased from ATCC and maintained according to ATCC instructions. Cells lines are passaged every 2-3 days, and cells at logarithmic growth phase are used for experiments.

[0231] PBMC are isolated through density gradient centrifugation. After sorting T cells by CD3 magnetic microbeads from PBMC, these cells are cultured in complete T-cell medium with CD3/CD28 stimulant. T cells are transduced with concentrated lentivirus within twenty-four hours after isolation. After that, cell density will be adjusted with the culture media every day.

[0232] Cells are separated by MACS microbeads (Miltenyi Biotec, Auburn, Calif.), following the manufacturer's protocol, using LS columns (Miltenyi Biotec). In order to elute bound cells, the columns are removed from the magnetic field. 3 ml of MACS Buffer is added to the column, and the eluted cells are collected.

[0233] For flow cytometry, cells are stained using standard procedures. Briefly, cells are suspended at a concentration of 1×10⁷ cells/ml in PBS+3% FBS for analysis or in Sort Buffer (PBS, 25 mM HEPES, 1 mM EDTA, 0.1% BSA) for sorting. The amount of antibody added is in accordance to manufacturer's suggested volume, or is determined by titration. Cells are analyzed by flow cytometry using a CytoFLEX (Beckman Coulter Life Sciences, Indianapolis, Ind.) and operated under standard procedures. To enrich subpopulations of CD4+ and/or CD8+ cells, magnetically separated cells are stained with anti-CD4 and/or anti-CD8 antibodies and sorted on a FACScalibur Cell Sorter.

[0234] All patents, patent applications, provisional applications, and publications referred to or cited herein are incorporated by reference in their entirety, including all figures and tables, to the extent they are not inconsistent with the explicit teachings of this specification.

[0235] Following are examples which illustrate procedures for practicing the invention. These examples should not be construed as limiting. All percentages are by weight and all solvent mixture proportions are by volume unless otherwise noted.

### Example 1—Vector Construction and Lentivirus Packaging

[0236] A lentiviral vector was constructed that encodes both a switchable anti-CD19 CAR and a switchable anti-CD22 CAR by applying different variants of NS3 protease switch. Co-expression of two targets was achieved by a self-cleaving viral 2A peptide sequence. Each CAR includes a CD28 and 4-1-BB costimulatory domain in addition to a CD3 zeta activating domain (Third-generation). For lentivirus packaging, 293T cells were co-transfected with the expression vector, psPAX2 and pMD2.G. The table below shows the CAR designations and respective CAR structures of CARs of the instant invention.

| | CAR Structure | | | | | | | |
|---|---|---|---|---|---|---|---|---|
| | signal | | | | | | | |
| CAR | peptide + | Cleavage | | | | Cleavage | | Intracellular |
| Designation | scFv | site | NS4A | NS3 | Hinge | site | TM | domain |
| NS3 T54A | + | + | + | + | + | + | + | + |
| NS3 WT | + | + | + | + | + | + | + | + |
| NS3 AI | + | + | + | + | + | + | + | + |
| NS3 TI | + | + | + | + | + | + | + | + |
| NS3 1CS | + | + | + | + | + | − | + | + |
| NS3 2CS | + | − | + | + | + | + | + | + |
| NS3 NCS | + | − | + | + | + | − | + | + |

### Example 2—In Vitro Functional Assays

[0237] After T cell transduction, different drugs were provided, CD19-, CD22-CAR were detected by CD19, CD22 protein through flow cytometry. Further, the biological characteristics of the dual-target switchable CAR-T cells were determined. For example, CD25 and CD69 antibodies were used to perform activation assays, CFSE for proliferation assays, CD4, CD8, CCR7 and CD45RA antibodies for determining T cell subsets, and Annexin-V for apoptosis assays. Further, cytotoxicity assays (Calcein-AM release), CD107a assay, and cytokine production detection were performed. These assays are of great importance in testing potency and defining how the switch system works.

### Example 3—Animal Experiments

[0238] Nalm-6/Raji cell lines were genetically edited to generate CD19 negative and/or CD22 negative cells by shRNA. Mutant versions of Luciferase were constructed into these cells, so that the cells that express different antigens react only with a unique luciferin [14]. This way, the activity of the dual-target switch can be determined by measuring luminescence intensities of different target cells.

[0239] Modified Nalm-6/Raji cell lines were intravenously (i.v.) injected into NSG mice (NOD.Cg-PrkdcscidIl2rgtm1Wj1/SzJ). Bioluminescence imaging was performed weekly after intraperitoneal injection of modified luciferins. Tumor burden was measured by flow cytometry of peripheral blood, bone marrow, and spleen.

### Example 4—Tumoricidal Assay

[0240] The positive target cells (Raji) and negative target cells (K562) were labeled with calcein-AM (Biolegend) and then cocultured with effector cells (CART cells with ASV) in 96-well plates at different ratios. The medium used in the cocultures was PBS+5% FBS. Wells with co-cultured target cells and PBS+5% FBS were used as spontaneous release wells, and wells with cocultured target cells and lysis solution were used as maximum release wells. The cultures were centrifuged after 3 h of incubation, and the supernatants were transferred to another 96-well plate. The fluorescence value of each well (F) was measured with a microplate reader, and the tumor-killing efficiency was calculated according to the following formula: lysis %=(F_{experimental well}−F_{spontaneous release})/(F_{maximum release}−F_{spontaneous release})×100%.

[0241] Table 1 shows the results of the tumoricidal in vitro assay. The results are also shown in FIGS. 6A-6B which show cell death and CD4/CD8 profiles of CAR-transduced cells in the presence and absence of asunaprevir.

TABLE 1

| E:T | 5:1 | 2:1 | 0.5:1 |
|---|---|---|---|
| Blank | 21% | 12% | 6% |
| CD19-only | 61% | 33% | 10% |
| NS3 T54A-CD19 | 60% | 32% | 10% |
| NS3 1CS-CD19 | 56% | 44% | 14% |

TABLE 2

| | | | Heavy | Light |
|---|---|---|---|---|
| | | | Sequence | Sequence |
| | | | (if | (if |
| Therapeutic | Heavy Sequence | Light Sequence | bispec) | bispec) |
| Abagovomab | QVKLQESGAELARPGASV | DIELTQSPASLSASVGETV | na | na |
| (Format: Whole | KLSCKASGYTFTNYWMQ | TITCQASENIYSYLAWHQ | | |
| mAb) | WVKQRPGQGLDWIGAIY | QKQGKSPQLLVYNAKTL | | |
| | PGDGNTRYTHKFKGKATL | AGGVSSRFSGSGSGTHFS | | |
| | TADKSSSTAYMQLSSLASE | LKIKSLQPEDFGIYYCQHH | | |
| | DSGVYYCARGEGNYAWF | YGILPTFGGGTKLEIK | | |
| | AYWGQGTTVTVSS (SEQ | (SEQ ID NO: 22) | | |
| | ID NO: 21) | | | |
| Abelacimab | QVQLLESGGGLVQPGGSL | QSVLTQPPSASGTPGQR | na | na |
| (Format: Whole | RLSCAASGFTFSTAAMSW | VTISCSGSSSNIGSNDVS | | |
| mAb) | VRQAPGKGLEWVSGISGS | WYQQLPGTAPKLLIYKNY | | |
| | GSSTYYADSVKGRFTISRD | NRPSGVPDRFSGSKSGTS | | |
| | NSKNTLYLQMNSLRATAV | ASLAISGLQSEDEADYYA | | |
| | YYCARELSYLYSGYYFDYW | WDQRQFDVVFGGGTKL | | |
| | GQGTLVTVSS (SEQ ID | TVL (SEQ ID NO: 24) | | |
| | NO: 23) | | | |
| Abituzumab | QVQLQQSGGELAKPGASV | DIQMTQSPSSLSASVGD | na | na |
| (Format: Whole | KVSCKASGYTFSSFWMH | RVTITCRASQDISNYLAW | | |
| mAb) | WVRQAPGQGLEWIGYIN | YQQKPGKAPKLLIYYTSKI | | |
| | PRSGYTEYNEIFRDKATMT | HSGVPSRFSGSGSGTDYT | | |
| | TDTSTSTAYMELSSLRSED | FTISSLQPEDIATYYCQQG | | |
| | TAVYYCASFLGRGAMDY | NTFPYTFGQGTKVEIK | | |
| | WGQGTTVTVSS (SEQ ID | (SEQ ID NO: 26) | | |
| | NO: 25) | | | |
| Abrezekimab | QVTLKESGPVLVKPTETLTL | DIQMTQSPSSLSASVGD | na | na |
| (Format: Fab) | TCTVSGFSLTNYHVQWIR | RVTITCLASEDISNYLAWY | | |
| | QPPGKALEWLGVMWSD | QQKPGKAPKLLIYHTSRL | | |
| | GDTSFNSVLKSRLTISRDTS | QDGVPSRFSGSGSGTDF | | |
| | KSQVVLTMTNMDPVATY | TLTISSLQPEDFATYYCGY | | |
| | YCARDGTIAAMDYFDYW | RFPLTFGGGTKVEIK | | |
| | GQGTLVTVSS (SEQ ID | (SEQ ID NO: 28) | | |
| | NO: 27) | | | |
| Abrilumab | QVQLVQSGAEVKKPGASV | DIQMTQSPSSVSASVGD | na | na |
| (Format: Whole | KVSCKVSGYTLSDLSIHWV | RVTITCRASQGISSWLAW | | |
| mAb) | RQAPGKGLEWMGGFDP | YQQKPGKAPKLLIYGASN | | |
| | QDGETIYAQKFQGRVTMT | LESGVPSRFSGSGSGTDF | | |
| | EDTSTDTAYMELSSLKSED | TLTISSLQPEDFANYYCQ | | |
| | TAVYYCATGSSSSWFDPW | QANSFPWTFGQGTKVEI | | |
| | GQGTLVTVSS (SEQ ID | K (SEQ ID NO: 30) | | |
| | NO: 29) | | | |
| Actoxumab | QVQLVESGGGVVQPGRSL | DIQMTQSPSSVSASVGD | na | na |
| (Format: Whole | RLSCAASGFSFSNYGMH | RVTITCRASQGISSWLAW | | |
| mAb) | WVRQAPGKGLEWVALIW | YQHKPGKAPKLLIYAASSL | | |
| | YDGSNEDYTDSVKGRFTIS | QSGVPSRFSGSGSGTDFT | | |
| | RDNSKNTLYLQMNSLRAE | LTISSLQPEDFATYYCQQ | | |
| | DTAVYYCARWGMVRGVI | ANSFPWTFGQGTKVEIK | | |
| | DVFDIWGQGTVVTVSS | (SEQ ID NO: 32) | | |
| | (SEQ ID NO: 31) | | | |
| Adalimumab | EVQLVESGGGLVQPGRSL | DIQMTQSPSSLSASVGD | na | na |
| (Format: Whole | RLSCAASGFTFDDYAMH | RVTITCRASQGIRNYLAW | | |
| mAb) | WVRQAPGKGLEWVSAIT | YQQKPGKAPKLLIYAAST | | |
| | WNSGHIDYADSVEGRFTIS | LQSGVPSRFSGSGSGTDF | | |
| | RDNAKNSLYLQMNSLRAE | TLTISSLQPEDVATYYCQR | | |
| | DTAVYYCAKVSYLSTASSL | YNRAPYTFGQGTKVEIK | | |
| | DYWGQGTLVTVSS (SEQ | (SEQ ID NO: 34) | | |
| | ID NO: 33) | | | |
| Aducanumab | QVQLVESGGGVVQPGRSL | DIQMTQSPSSLSASVGD | na | na |
| (Format: Whole | RLSCAASGFAFSSYGMHW | RVTITCRASQSISSYLNWY | | |
| mAb) | VRQAPGKGLEWVAVIWF | QQKPGKAPKLLIYAASSL | | |
| | DGTKKYYTDSVKGRFTISR | QSGVPSRFSGSGSGTDFT | | |
| | DNSKNTLYLQMNTLRAED | LTISSLQPEDFATYYCQQS | | |
| | TAVYYCARDRGIGARRGP | YSTPLTFGGGTKVEIK | | |
| | YYMDVWGKGTTVTVSS | (SEQ ID NO: 36) | | |
| | (SEQ ID NO: 35) | | | |
| Afasevikumab | EVQLVESGGGLVQPGRSL | EIVLTQSPATLSLSPGERA | na | na |
| (Format: Whole | RLSCAASGFTFDDYAMH | TLSCRASQSVRSYLAWYQ | | |
| mAb) | WVRQAPGKGLEWVSGIN | QKPGQAPRLLIYDASNRA | | |
| | WSSGGIGYADSVKGRFTIS | TGIPARFSGSGSGTDFTLT | | |
| | RDNAKNSLYLQMNSLRAE | ISSLEPEDFAVYYCQQRS | | |
| | DTALYYCARDIGGFGEFY | NWPPATFGGGTKVEIK | | |
| | WNFGLWGRGTLVTVSS | (SEQ ID NO: 38) | | |
| | (SEQ ID NO: 37) | | | |
| Alacizumab | EVQLVESGGGLVQPGGSL | DIQMTQSPSSLSASVGD | na | na |
| (Format: di-Fab) | RLSCAASGFTFSSYGMSW | RVTITCRASQDIAGSLNW | | |
| | VRQAPGKGLEWVATITSG | LQQKPGKAIKRLIYATSSL | | |
| | GSYTYYVDSVKGRFTISRD | DSGVPKRFSGSRSGSDYT | | |
| | NAKNTLYLQMNSLRAEDT | LTISSLQPEDFATYYCLQY | | |
| | AVYYCVRIGEDALDYWGQ | GSFPPTFGQGTKVEIK | | |
| | GTLVTVSS (SEQ ID NO: | (SEQ ID NO: 40) | | |
| | 39) | | | |
| Alemtuzumab | QVQLQESGPGLVRPSQTL | DIQMTQSPSSLSASVGD | na | na |
| (Format: Whole | SLTCTVSGFTFTDFYMNW | RVTITCKASQNIDKYLNW | | |
| mAb) | VRQPPGRGLEWIGFIRDK | YQQKPGKAPKLLIYNTNN | | |
| | AKGYTTEYNPSVKGRVTM | LQTGVPSRFSGSGSGTDF | | |
| | LVDTSKNQFSLRLSSVTAA | TFTISSLQPEDIATYYCLQ | | |
| | DTAVYYCAREGHTAAPFD | HISRPRTFGQGTKVEIK | | |
| | YWGQGSLVTVSS (SEQ ID | (SEQ ID NO: 42) | | |
| | NO: 41) | | | |
| Alirocumab | EVQLVESGGGLVQPGGSL | DIVMTQSPDSLAVSLGER | na | na |
| (Format: Whole | RLSCAASGFTFNNYAMN | ATINCKSSQSVLYRSNNR | | |
| mAb) | WVRQAPGKGLDWVSTIS | NFLGWYQQKPGQPPNL | | |
| | GSGGTTNYADSVKGRFIIS | LIYWASTRESGVPDRFSG | | |
| | RDSSKHTLYLQMNSLRAE | SGSGTDFTLTISSLQAEDV | | |
| | DTAVYYCAKDSNWGNFD | AVYYCQQYYTTPYTFGQ | | |
| | LWGRGTLVTVSS (SEQ ID | GTKLEIK (SEQ ID NO: | | |
| | NO: 43) | 44) | | |
| Amatuximab | QVQLQQSGPELEKPGASV | DIELTQSPAIMSASPGEK | na | na |
| (Format: Whole | KISCKASGYSFTGYTMNW | VTMTCSASSSVSYMHWY | | |
| mAb) | VKQSHGKSLEWIGLITPYN | QQKSGTSPKRWIYDTSKL | | |
| | GASSYNQKFRGKATLTVD | ASGVPGRFSGSGSGNSYS | | |
| | KSSSTAYMDLLSLTSEDSA | LTISSVEAEDDATYYCQQ | | |
| | VYFCARGGYDGRGFDYW | WSKHPLTFGSGTKVEIK | | |
| | GSGTPVTVSS (SEQ ID | (SEQ ID NO: 46) | | |
| | NO: 45) | | | |
| Andecaliximab | QVQLQESGPGLVKPSETLS | DIQMTQSPSSLSASVGD | na | na |
| (Format: Whole | LTCTVSGFSLLSYGVHWVR | RVTITCKASQDVRNTVA | | |
| mAb) | QPPGKGLEWLGVIWTGG | WYQQKPGKAPKLLIYSSS | | |
| | TTNYNSALMSRFTISKDDS | YRNTGVPDRFSGSGSGT | | |
| | KNTVYLKMNSLKTEDTAIY | DFTLTISSLQAEDVAVYYC | | |
| | YCARYYYGMDYWGQGTL | QQHYITPYTFGGGTKVEI | | |
| | VTVSS (SEQ ID NO: 47) | K (SEQ ID NO: 48) | | |
| Anetumab | QVELVQSGAEVKKPGESL | DIALTQPASVSGSPGQSIT | na | na |
| (Format: Whole | KISCKGSGYSFTSYWIGWV | ISCTGTSSDIGGYNSVSW | | |
| mAb ADC) | RQAPGKGLEWMGIIDPG | YQQHPGKAPKLMIYGVN | | |
| | DSRTRYSPSFQGQVTISAD | NRPSGVSNRFSGSKSGN | | |
| | KSISTAYLQWSSLKASDTA | TASLTISGLQAEDEADYY | | |
| | MYYCARGQLYGGTYMDG | CSSYDIESATPVFGGGTKL | | |
| | WGQGTLVTVSS (SEQ ID | TVL (SEQ ID NO: 50) | | |
| | NO: 49) | | | |
| Anifrolumab | EVQLVQSGAEVKKPGESL | EIVLTQSPGTLSLSPGERA | na | na |
| (Format: Whole | KISCKGSGYIFTNYWIAWV | TLSCRASQSVSSSFFAWY | | |
| mAb) | RQMPGKGLESMGIIYPGD | QQKPGQAPRLLIYGASSR | | |
| | SDIRYSPSFQGQVTISADKS | ATGIPDRLSGSGSGTDFT | | |
| | ITTAYLQWSSLKASDTAM | LTITRLEPEDFAVYYCQQY | | |
| | YYCARHDIEGFDYWGRGT | DSSAITFGQGTRLEIK | | |
| | LVTVSS (SEQ ID NO: 51) | (SEQ ID NO: 52) | | |
| Anrukinzumab | EVQLVESGGGLVQPGGSL | DIQMTQSPSSLSASVGD | na | na |
| (Format: Whole | RLSCAASGFTFISYAMSWV | RVTITCKASESVDNYGKS | | |
| mAb) | RQAPGKGLEWVASISSGG | LMHWYQQKPGKAPKLLI | | |
| | NTYYPDSVKGRFTISRDNA | YRASNLESGVPSRFSGSG | | |
| | KNSLYLQMNSLRAEDTAV | SGTDFTLTISSLQPEDFAT | | |
| | YYCARLDGYYFGFAYWGQ | YYCQQSNEDPWTFGGG | | |
| | GTLVTVSS (SEQ ID NO: | TKVEIK | | |
| | 53) | (SEQ ID NO: 54) | | |
| Apamistamab | EVKLLESGGGLVQPGGSLK | DIALTQSPASLAVSLGQR | na | na |
| (Format: Whole | LSCAASGFDFSRYWMSW | ATISCRASKSVSTSGYSYL | | |
| mAb | VRQAPGKGLEWIGEINPT | HWYQQKPGQPPKLLIYL | | |
| Radiolabelled) | SSTINFTPSLKDKVFISRDN | ASNLESGVPARFSGSGSG | | |
| | AKNTLYLQMSKVRSEDTA | TDFTLNIHPVEEEDAATY | | |
| | LYYCARGNYYRYGDAMDY | YCQHSRELPFTFGSGTKL | | |
| | WGQGTSVTVSS (SEQ ID | EIK (SEQ ID NO: 56) | | |
| | NO: 55) | | | |
| Aprutumab | EVQLLESGGGLVQPGGSL | QSVLTQPPSASGTPGQR | na | na |
| (Format: Whole | RLSCAASGFTFSSYAMSW | VTISCSGSSSNIGNNYVS | | |
| mAb ADC) | VRQAPGKGLEWVSAISGS | WYQQLPGTAPKLLIYENY | | |
| | GTSTYYADSVKGRFTISRD | NRPAGVPDRFSGSKSGT | | |
| | NSKNTLYLQMNSLRAEDT | SASLAISGLRSEDEADYYC | | |
| | AVYYCARVRYNWNHGD | SSWDDSLNYWVFGGGT | | |
| | WFDPWGQGTLVTVSS | KLTVL | | |
| | (SEQ ID NO: 57) | (SEQ ID NO: 58) | | |
| Ascrinvacumab | QVQLQESGPGLVKPSQTL | EIVLTQSPGTLSLSPGERA | na | na |
| (Format: Whole | SLTCTVSGGSISSGEYYWN | TLSCRASQSVSSSYLAWY | | |
| mAb) | WIRQHPGKGLEWIGYIYYS | QQKPGQAPRLLIYGTSSR | | |
| | GSTYYNPSLKSRVTISVDTS | ATGIPDRFSGSGSGTDFT | | |
| | KNQFSLKLSSVTAADTAVY | LTISRLEPEDFAVYYCQQY | | |
| | YCARESVAGFDYWGQGTL | GSSPITFGQGTRLEIK | | |
| | VTVSS (SEQ ID NO: 59) | (SEQ ID NO: 60) | | |
| Atezolizumab | EVQLVESGGGLVQPGGSL | DIQMTQSPSSLSASVGD | na | na |
| (Format: Whole | RLSCAASGFTFSDSWIHW | RVTITCRASQDVSTAVA | | |
| mAb) | VRQAPGKGLEWVAWISP | WYQQKPGKAPKLLIYSAS | | |
| | YGGSTYYADSVKGRFTISA | FLYSGVPSRFSGSGSGTD | | |
| | DTSKNTAYLQMNSLRAED | FTLTISSLQPEDFATYYCQ | | |
| | TAVYYCARRHWPGGFDY | QYLYHPATFGQGTKVEIK | | |
| | WGQGTLVTVSS (SEQ ID | (SEQ ID NO: 62) | | |
| | NO: 61) | | | |
| Atidortoxumab | EVQLQESGPGLVRPSETLS | DIQMTQSPSSVSASVGD | na | na |
| (Format: Whole | LTCAVSGYSISSGMGWG | RVTITCRASQGISRWLA | | |
| mAb) | WIRQPPGKGLEWIGSIDQ | WYQQKPGKAPKLLIYAA | | |
| | RGSTYYNPSLKSRVTISVDT | SSLQSGVPSRFSGSGSGT | | |
| | SKNQFSLKLSSVTAADTAV | DFTLTISSLQPEDFATYYC | | |
| | YYCARDAGHAVDMDVW | QQGYVFPLTFGGGTKVEI | | |
| | GKGTTVTVSS (SEQ ID | K (SEQ ID NO: 64) | | |
| | NO: 63) | | | |
| Atinumab | EVQLVESGGGLVQPGGSL | EIVLTQSPATLSLSPGERA | na | na |
| (Format: Whole | RLSCAASGFTFSNYWMS | TLSCRASQSVSSYLAWYQ | | |
| mAb) | WVRQAPGKGLEWVATIK | QKPGQAPRLLIYDASNRA | | |
| | QDGSQKNYVDSVKGRFTI | TGIPARFSGSGSGTDFTLT | | |
| | SRDNAKNSLYLRLNSLRAE | ISSLEPEDFAVYYCQQRS | | |
| | DTAVYYCATELFDLWGRG | NWPITFGQGTKLEIK | | |
| | SLVTVSS (SEQ ID NO: 65) | (SEQ ID NO: 66) | | |
| Atoltivimab | QVQLVESGGGVVQPGRSL | DIQMTQSPSSLSASVGD | na | na |
| (Format: Whole | RLSCAASGFTFNNYGMH | RITITCRASQSISTYLHWY | | |
| mAb) | WVRQAPGMGLEWVAVI | QQKPGKAPKLLIYAASTL | | |
| | WHDGSDKYYADSVKGRF | QSGVPSRFSGSGSGTDFT | | |
| | TISRDNSKNTLYLQMNSLR | LTISSLQPEDFATYYCQQS | | |
| | AEDTAVYYCARNWNLFDY | FSTPPINFGQGTKLEIK | | |
| | WGQGTLVTVSS (SEQ ID | (SEQ ID NO: 68) | | |
| | NO: 67) | | | |
| Avelumab | EVQLLESGGGLVQPGGSL | QSALTQPASVSGSPGQSI | na | na |
| (Bintrafusp) | RLSCAASGFTFSSYIMMW | TISCTGTSSDVGGYNYVS | | |
| (Format: Whole | VRQAPGKGLEWVSSIYPS | WYQQHPGKAPKLMIYD | | |
| mAb) | GGITFYADTVKGRFTISRD | VSNRPSGVSNRFSGSKSG | | |
| | NSKNTLYLQMNSLRAEDT | NTASLTISGLQAEDEADY | | |
| | AVYYCARIKLGTVTTVDY | YCSSYTSSSTRVFGTGTKV | | |
| | WGQGTLVTVSS (SEQ ID | TVL (SEQ ID NO: 70) | | |
| | NO: 69) | | | |
| Azintuxizumab | EVQLVESGGGLVQPGGSL | DVVMTQTPLSLSVTPGQ | na | na |
| (Format: Whole | RLSCAASGFTFSDYYMAW | PASISCRSSQSLVHSNGN | | |
| mAb ADC) | VRQAPGKGLEWVASINYD | TYLHWYLQKPGQSPQLLI | | |
| | GSSTYYVDSVKGRFTISRD | YKVSNRFSGVPDRFSGSG | | |
| | NAKNSLYLQMNSLRAEDT | SGTDFTLKISRVEAEDVG | | |
| | AVYYCARDRGYYFDYWG | VYFCSQSTHVPPFTFGGG | | |
| | QGTTVTVSS (SEQ ID NO: | TKVEIK (SEQ ID NO: 72) | | |
| | 71) | | | |
| Balstilimab | QVQLVESGGGVVQPGRSL | EIVMTQSPATLSVSPGER | na | na |
| (Format: Whole | RLSCAASGFTFSSYGMHW | ATLSCRASQSVSSNLAWY | | |
| mAb) | VRQAPGKGLEWVAVIWY | QQKPGQAPRLLIYGASTR | | |
| | DGSNKYYADSVKGRFTISR | ATGIPARFSGSGSGTEFTL | | |
| | DNSKNTLYLQMNSLRAED | TISSLQSEDFAVYYCQQY | | |
| | TAVYYCASNGDHWGQGT | NNWPRTFGQGTKVEIK | | |
| | LVTVSS (SEQ ID NO: 73) | (SEQ ID NO: 74) | | |
| Bapineuzumab | EVQLLESGGGLVQPGGSL | DVVMTQSPLSLPVTPGE | na | na |
| (Format: Whole | RLSCAASGFTFSNYGMSW | PASISCKSSQSLLDSDGKT | | |
| mAb) | VRQAPGKGLEWVASIRSG | YLNWLLQKPGQSPQRLIY | | |
| | GGRTYYSDNVKGRFTISRD | LVSKLDSGVPDRFSGSGS | | |
| | NSKNTLYLQMNSLRAEDT | GTDFTLKISRVEAEDVGV | | |
| | AVYYCVRYDHYSGSSDYW | YYCWQGTHFPRTFGQGT | | |
| | GQGTLVTVSS (SEQ ID | KVEIK | | |
| | NO: 75) | (SEQ ID NO: 76) | | |
| Basiliximab | QVQLQQSGTVLARPGASV | QIVSTQSPAIMSASPGEK | na | na |
| (Format: Whole | KMSCKASGYSFTRYWMH | VTMTCSASSSRSYMQW | | |
| mAb) | WIKQRPGQGLEWIGAIYP | YQQKPGTSPKRWIYDTS | | |
| | GNSDTSYNQKFEGKAKLT | KLASGVPARFSGSGSGTS | | |
| | AVTSASTAYMELSSLTHED | YSLTISSMEAEDAATYYC | | |
| | SAVYYCSRDYGYYFDFWG | HQRSSYTFGGGTKLEIK | | |
| | QGTTLTVSS (SEQ ID NO: | (SEQ ID NO: 78) | | |
| | 77) | | | |
| Bavituximab | EVQLQQSGPELEKPGASV | DIQMTQSPSSLSASLGER | na | na |
| (Format: Whole | KLSCKASGYSFTGYNMNW | VSLTCRASQDIGSSLNWL | | |
| mAb) | VKQSHGKSLEWIGHIDPYY | QQGPDGTIKRLIYATSSL | | |
| | GDTSYNQKFRGKATLTVD | DSGVPKRFSGSRSGSDYS | | |
| | KSSSTAYMQLKSLTSEDSA | LTISSLESEDFVDYYCLQY | | |
| | VYYCVKGGYYGHWYFDV | VSSPPTFGAGTKLELK | | |
| | WGAGTTVTVSS (SEQ ID | (SEQ ID NO: 80) | | |
| | NO: 79) | | | |
| Bedinvetmab | EVQLVESGGDLVKPGGSL | QSVLTQPTSVSGSLGWR | na | na |
| (Format: Canine | RLSCVASGFTFSSHGMHW | VTISCSGSTNNIGILGAS | | |
| Whole mAb) | VRQSPGKGLQWVAVINS | WYQLFPGKAPKLLVYGN | | |
| | GGSSTYYTDAVKGRFTISR | GNRPSGVPDRFSGADSG | | |
| | DNAKNTVYLQMNSLRAE | DSVTLTITGLQAEDEADY | | |
| | DTAMYYCAKESVGGWEQ | YCQSFDTTLGAHVFGGG | | |
| | LVGPHFDYWGQGTLVIVS | THLTVL | | |
| | S (SEQ ID NO: 81) | (SEQ ID NO: 82) | | |
| Begelomab | QVQLQQSGAELVKPGASV | QIVLTQSPAIMSASPGEK | na | na |
| (Format: Whole | KLSCKASGYTFRSYDINWV | VTITCSASSSVSYMNWF | | |
| mAb) | RQRPEQGLEWIGWIFPGD | QQKPGTSPKLWIYSTSNL | | |
| | GSTKYNEKFKGKATLTTDK | ASGVPARFSGSGSGTSYS | | |
| | SSSTAYMQLSRLTSEDSAV | LTISRMEAEDAATYYCQQ | | |
| | YFCARWTVVGPGYFDVW | RSSYPNTFGGGTKLEIK | | |
| | GAGTTVTVSS (SEQ ID | (SEQ ID NO: 84) | | |
| | NO: 83) | | | |
| Belantamab | QVQLVQSGAEVKKPGSSV | DIQMTQSPSSLSASVGD | na | na |
| (Format: Whole | KVSCKASGGTFSNYWMH | RVTITCSASQDISNYLNW | | |
| mAb ADC) | WVRQAPGQGLEWMGAT | YQQKPGKAPKLLIYYTSNL | | |
| | YRGHSDTYYNQKFKGRVTI | HSGVPSRFSGSGSGTDFT | | |
| | TADKSTSTAYMELSSLRSE | LTISSLQPEDFATYYCQQY | | |
| | DTAVYYCARGAIYDGYDVL | RKLPWTFGQGTKLEIK | | |
| | DNWGQGTLVTVSS (SEQ | (SEQ ID NO: 86) | | |
| | ID NO: 85) | | | |
| Belimumab | QVQLQQSGAEVKKPGSSV | SSELTQDPAVSVALGQTV | na | na |
| (Format: Whole | RVSCKASGGTFNNNAIN | RVTCQGDSLRSYYASWY | | |
| mAb) | WVRQAPGQGLEWMGGII | QQKPGQAPVLVIYGKNN | | |
| | PMFGTAKYSQNFQGRVAI | RPSGIPDRFSGSSSGNTA | | |
| | TADESTGTASMELSSLRSE | SLTITGAQAEDEADYYCS | | |
| | DTAVYYCARSRDLLLFPHH | SRDSSGNHWVFGGGTEL | | |
| | ALSPWGRGTMVTVSS | TVL (SEQ ID NO: 88) | | |
| | (SEQ ID NO: 87) | | | |
| Bemarituzumab | QVQLVQSGAEVKKPGSSV | DIQMTQSPSSLSASVGD | na | na |
| (Format: Whole | KVSCKASGYIFTTYNVHW | RVTITCKASQGVSNDVA | | |
| mAb) | VRQAPGQGLEWIGSIYPD | WYQQKPGKAPKLLIYSAS | | |
| | NGDTSYNQNFKGRATITA | YRYTGVPSRFSGSGSGTD | | |
| | DKSTSTAYMELSSLRSEDT | FTFTISSLQPEDIATYYCQ | | |
| | AVYYCARGDFAYWGQGT | QHSTTPYTFGQGTKLEIK | | |
| | LVTVSS (SEQ ID NO: 89) | (SEQ ID NO: 90) | | |
| Benralizumab | EVQLVQSGAEVKKPGASV | DIQMTQSPSSLSASVGD | na | na |
| (Format: Whole | KVSCKASGYTFTSYVIHWV | RVTITCGTSEDIINYLNWY | | |
| mAb) | RQRPGQGLAWMGYINPY | QQKPGKAPKLLIYHTSRL | | |
| | NDGTKYNERFKGKVTITSD | QSGVPSRFSGSGSGTDFT | | |
| | RSTSTVYMELSSLRSEDTA | LTISSLQPEDFATYYCQQ | | |
| | VYLCGREGIRYYGLLGDYW | GYTLPYTFGQGTKVEIK | | |
| | GQGTLVTVSS (SEQ ID | (SEQ ID NO: 92) | | |
| | NO: 91) | | | |
| Berlimatoxumab | ELQLQESGPGLVKPSETLSL | DIQMTQSPSSLSASVGD | na | na |
| (Format: Whole | TCTVSGGSISSGSYYWDWI | RVTITCRASQSINSYLNW | | |
| mAb) | RQPPGKGLEWIGNIYKSGS | YQQKPGKAPKLLIYAASSL | | |
| | TYYNPSLKSRVTISVDTSKN | QSGVPSRFSGSGSGTDFT | | |
| | QFSLKLSSVTAADTAVYYC | LTISSLQPEDFATYYCQQ | | |
| | ARERGMHYMDVWGKGT | QFDPPFTFGGGTKVEIK | | |
| | TVTVSS (SEQ ID NO: 93) | (SEQ ID NO: 94) | | |
| Bermekimab | QVQLVESGGGVVQPGRSL | DIQMTQSPSSVSASVGD | na | na |
| (Format: Whole | RLSCTASGFTFSMFGVHW | RVTITCRASQGISSWLAW | | |
| mAb) | VRQAPGKGLEWVAAVSY | YQQKPGKAPKLLIYEASN | | |
| | DGSNKYYAESVKGRFTISR | LETGVPSRFSGSGSGSDF | | |
| | DNSKNILFLQMDSLRLEDT | TLTISSLQPEDFATYYCQQ | | |
| | AVYYCARGRPKVVIPAPLA | TSSFLLSFGGGTKVEHK | | |
| | HWGQGTLVTFSS (SEQ ID | (SEQ ID NO: 96) | | |
| | NO: 95) | | | |
| Bersanlimab | EVQLLESGGGLVQPGGSL | QSVLTQPPSASGTPGQR | na | na |
| (Format: Whole | RLSCAASGFTFSNAWMS | VTISCTGSSSNIGAGYDV | | |
| mAb) | WVRQAPGKGLEWVAFIW | HWYQQLPGTAPKLLIYD | | |
| | YDGSNKYYADSVKGRFTIS | NNNRPSGVPDRFSGSKS | | |
| | RDNSKNTLYLQMNSLRAE | GTSASLAISGLRSEDEADY | | |
| | DTAVYYCARYSGWYFDY | YCQSYDSSLSAWLFGGG | | |
| | WGQGTLVTVSS (SEQ ID | TKLTVL (SEQ ID NO: 98) | | |
| | NO: 97) | | | |
| Bevacizumab | EVQLVESGGGLVQPGGSL | DIQMTQSPSSLSASVGD | na | na |
| (Format: Whole | RLSCAASGYTFTNYGMN | RVTITCSASQDISNYLNW | | |
| mAb) | WVRQAPGKGLEWVGWI | YQQKPGKAPKVLIYFTSSL | | |
| | NTYTGEPTYAADFKRRFTF | HSGVPSRFSGSGSGTDFT | | |
| | SLDTSKSTAYLQMNSLRAE | LTISSLQPEDFATYYCQQY | | |
| | DTAVYYCAKYPHYYGSSH | STVPWTFGQGTKVEIK | | |
| | WYFDVWGQGTLVTVSS | (SEQ ID NO: 100) | | |
| | (SEQ ID NO: 99) | | | |
| Bezlotoxumab | EVQLVQSGAEVKKSGESLK | EIVLTQSPGTLSLSPGERA | na | na |
| (Format: Whole | ISCKGSGYSFTSYWIGWVR | TLSCRASQSVSSSYLAWY | | |
| mAb) | QMPGKGLEWMGIFYPGD | QQKPGQAPRLLIYGASSR | | |
| | SSTRYSPSFQGQVTISADK | ATGIPDRFSGSGSGTDFT | | |
| | SVNTAYLQWSSLKASDTA | LTISRLEPEDFAVYYCQQY | | |
| | MYYCARRRNWGNAFDI | GSSTWTFGQGTKVEIK | | |
| | WGQGTMVTVSS (SEQ ID | (SEQ ID NO: 102) | | |
| | NO: 101) | | | |
| Blmagrumab | QVQLVQSGAEVKKPGASV | QSALTQPASVSGSPGQSI | na | na |
| (Format: Whole | KVSCKASGYTFTSSYINWV | TISCTGTSSDVGSYNYVN | | |
| mAb) | RQAPGQGLEWMGTINPV | WYQQHPGKAPKLMIYG | | |
| | SGSTSYAQKFQGRVTMTR | VSKRPSGVSNRFSGSKSG | | |
| | DTSISTAYMELSRLRSDDT | NTASLTISGLQAEDEADY | | |
| | AVYYCARGGWFDYWGQ | YCGTFAGGSYYGVFGGG | | |
| | GTLVTVSS (SEQ ID NO: | TKLTVL (SEQ ID NO: | | |
| | 103) | 104) | | |
| Bimekizumab | EVQLVESGGGLVQPGGSL | AIQLTQSPSSLSASVGDR | na | na |
| (Format: Whole | RLSCAASGFTFSDYNMAW | VTITCRADESVRTLMHW | | |
| mAb) | VRQAPGKGLEWVATITYE | YQQKPGKAPKLLIYLVSN | | |
| | GRNTYYRDSVKGRFTISRD | SEIGVPDRFSGSGSGTDF | | |
| | NAKNSLYLQMNSLRAEDT | RLTISSLQPEDFATYYCQQ | | |
| | AVYYCASPPQYYEGSIYRL | TWSDPWTFGQGTKVEIK | | |
| | WFAHWGQGTLVTVSS | (SEQ ID NO: 106) | | |
| | (SEQ ID NO: 105) | | | |
| Birtamimab | EVQLVESGGGLVQPGGSL | DVVMTQSPLSLPVTPGE | na | na |
| (Format: Whole | RLSCAASGFTFNTYAMYW | PASISCRSSQSLVHSTGNT | | |
| mAb) | IRQAPGKGLEWVARIRSKS | YLHWYLQKPGQSPQLLIY | | |
| | NNYAIYYADSVKDRFTISR | KVSNRFSGVPDRFSGSGS | | |
| | DDSKNSLYLQMNSLKTED | GTDFTLKISRVEAEDVGV | | |
| | TAVYYCARPYSDSFAYWG | YYCSQSTHVPFTFGGGTK | | |
| | QGTLVTVSS (SEQ ID NO: | VEIK (SEQ ID NO: 108) | | |
| | 107) | | | |
| Bleselumab | QLQLQESGPGLLKPSETLS | AIQLTQSPSSLSASVGDR | na | na |
| (Format: Whole | LTCTVSGGSISSPGYYGGW | VTITCRASQGISSALAWY | | |
| mAb) | IRQPPGKGLEWIGSIYKSG | QQKPGKAPKLLIYDASNL | | |
| | STYHNPSLKSRVTISVDTSK | ESGVPSRFSGSGSGTDFT | | |
| | NQFSLKLSSVTAADTAVYY | LTISSLQPEDFATYYCQQF | | |
| | CTRPVVRYFGWFDPWGQ | NSYPTFGQGTKVEIK | | |
| | GTLVTVSS (SEQ ID NO: | (SEQ ID NO: 110) | | |
| | 109) | | | |
| Blinatumomab | QVQLQQSGAELVRPGSSV | DIQLTQSPASLAVSLGQR | DIKLQSGAELARPG | DIQLTQSPAIMSA |
| (Format: | KISCKASGYAFSSYWMNW | ATISCKASQSVDYDGDSY | ASVKMSCKTSGYT | SPGEKVTMTCRA |
| Bispecific | VKQRPGQGLEWIGQIWP | LNWYQQIPGQPPKLLIYD | FTRYTMHWVKQR | SSSVSYMNWYQ |
| T-Cell | GDGDTNYNGKFKGKATLT | ASNLVSGIPPRFSGSGSG | PGQGLEWIGYINP | QKSGTSPKRWIY |
| Engager) | ADESSSTAYMQLSSLASED | TDFTLNIHPVEKVDAATY | SRGYTNYNQKFKD | DTSKVASGVPYRF |
| | SAVYFCARRETTTVGRYYY | HCQQSTEDPWTFGGGT | KATLTTDKSSSTAY | SGSGSGTSYSLTIS |
| | AMDYWGQGTTVTVSS | KLEIK | MQLSSLTSEDSAVY | SMEAEDAATYYC |
| | (SEQ ID NO: 111) | (SEQ ID NO: 112) | YCARYYDDHYCLD | QQWSSNPLTFGA |
| | | | YWGQGTTLTVSS | GTKLELK (SEQ ID |
| | | | (SEQ ID NO: 113) | NO: 114) |
| Blontuvetmab | QVQLQQSRAELVRPGASV | DVVMSQSPSSLAVSVGE | na | na |
| (Format: Canine | TLSCKPSGYTFTDYEVHW | KVTMSCKSSQSLLYSGN | | |
| Whole mAb) | VKQTPVHGLEWIGAIDPE | QKNYLAWYQQKPGQSP | | |
| | TGGTADNQKFKGKAILTA | RLLIYWASTRESGVPDRF | | |
| | DKSSSTAYMELRSLTSEDS | TGSGSGTDFTLTISSVKAE | | |
| | AVYYCTNFVDVWGTGTT | DLAVFYCQQYYNYPLTFG | | |
| | VTVSS (SEQ ID NO: 115) | GGTHL (SEQ ID NO: | | |
| | | 116) | | |
| Blosozumab | QVQLVQSGAEVKKPGASV | DIQMTQSPSSLSASVGD | na | na |
| (Format: Whole | KVSCKVSGFPIKDTFQHW | RVTITCKASQDVHTAVA | | |
| mAb) | VRQAPGKGLEWMGWSD | WYQQKPGKAPKLLIYWA | | |
| | PEIGDTEYASKFQGRVTM | STRWTGVPSRFSGSGSG | | |
| | TEDTSTDTAYMELSSLRSE | TDFTLTISSLQPEDFATYY | | |
| | DTAVYYCATGDTTYKFDF | CQQYSDYPWTFGGGTK | | |
| | WGQGTTVTVSS (SEQ ID | VEIK (SEQ ID NO: 118) | | |
| | NO: 117) | | | |
| Bococizumab | QVQLVQSGAEVKKPGASV | DIQMTQSPSSLSASVGD | na | na |
| (Format: Whole | KVSCKASGYTFTSYYMHW | RVTITCRASQGISSALAW | | |
| mAb) | VRQAPGQGLEWMGEISP | YQQKPGKAPKLLIYSASY | | |
| | FGGRTNYNEKFKSRVTMT | RYTGVPSRFSGSGSGTDF | | |
| | RDTSTSTVYMELSSLRSED | TFTISSLQPEDIATYYCQQ | | |
| | TAVYYCARERPLYASDLW | RYSLWRTFGQGTKLEIK | | |
| | GQGTTVTVSS (SEQ ID | (SEQ ID NO: 120) | | |
| | NO: 119) | | | |
| Brazikumab | QVQLVESGGGVVQPGRSL | QSVLTQPPSVSGAPGQR | na | na |
| (Format: Whole | RLSCAASGFTFSSYGMHW | VTISCTGSSSNTGAGYDV | | |
| mAb) | VRQAPGKGLEWVAVIWY | HWYQQVPGTAPKLLIYG | | |
| | DGSNEYYADSVKGRFTISR | SGNRPSGVPDRFSGSKS | | |
| | DNSKNTLYLQMNSLRAED | GTSASLAITGLQAEDEAD | | |
| | TAVYYCARDRGYTSSWYP | YYCQSYDSSLSGWVFGG | | |
| | DAFDIWGQGTMVTVSS | GTRLTVL (SEQ ID NO: | | |
| | (SEQ ID NO: 121) | 122) | | |
| Brentuximab | QIQLQQSGPEVVKPGASV | DIVLTQSPASLAVSLGQR | na | na |
| (Format: Whole | KISCKASGYTFTDYYITWV | ATISCKASQSVDFDGDSY | | |
| mAb ADC) | KQKPGQGLEWIGWIYPGS | MNWYQQKPGQPPKVLI | | |
| | GNTKYNEKFKGKATLTVD | YAASNLESGIPARFSGSG | | |
| | TSSSTAFMQLSSLTSEDTA | SGTDFTLNIHPVEEEDAA | | |
| | VYFCANYGNYWFAYWGQ | TYYCQQSNEDPWTFGG | | |
| | GTQVTVSA (SEQ ID NO: | GTKLEIK (SEQ ID NO: | | |
| | 123) | 124) | | |
| Briakinumab | QVQLVESGGGVVQPGRSL | QSVLTQPPSVSGAPGQR | na | na |
| (Format: Whole | RLSCAASGFTFSSYGMHW | VTISCSGSRSNIGSNTVK | | |
| mAb) | VRQAPGKGLEWVAFIRYD | WYQQLPGTAPKLLIYYN | | |
| | GSNKYYADSVKGRFTISRD | DQRPSGVPDRFSGSKSG | | |
| | NSKNTLYLQMNSLRAEDT | TSASLAITGLQAEDEADY | | |
| | AVYYCKTHGSHDNWGQG | YCQSYDRYTHPALLFGTG | | |
| | TMVTVSS (SEQ ID NO: | TKVTVL (SEQ ID NO: | | |
| | 125) | 126) | | |
| Brodalumab | QVQLVQSGAEVKKPGASV | EIVMTQSPATLSVSPGER | na | na |
| (Format: Whole | KVSCKASGYTFTRYGISWV | ATLSCRASQSVSSNLAWF | | |
| mAb) | RQAPGQGLEWMGWISTY | QQKPGQAPRPLIYDASTR | | |
| | SGNTNYAQKLQGRVTMT | ATGVPARFSGSGSGTDFT | | |
| | TDTSTSTAYMELRSLRSDD | LTISSLQSEDFAVYYCQQY | | |
| | TAVYYCARRQLYFDYWGQ | DNWPLTFGGGTKVEIK | | |
| | GTLVTVSS (SEQ ID NO: | (SEQ ID NO: 128) | | |
| | 127) | | | |
| Brolucizumab | EVQLVESGGGLVQPGGSL | MEIVMTQSPSTLSASVG | na | na |
| (Format: scFv) | RLSCTASGFSLTDYYYMT | DRVIITCQASEIIHSWLA | | |
| | WVRQAPGKGLEWVGFID | WYQQKPGKAPKLLIYLAS | | |
| | PDDDPYYATWAKGRFTIS | TLASGVPSRFSGSGSGAE | | |
| | RDNSKNTLYLQMNSLRAE | FTLTISSLQPDDFATYYCQ | | |
| | DTAVYYCAGGDHNSGWG | NVYLASTNGANFGQGTK | | |
| | LDIWGQGTLVTVSS (SEQ | LTVLG (SEQ ID NO: 130) | | |
| | ID NO: 129) | | | |
| Brontictuzumab | QVQLVQSGAEVKKPGASV | QAVVTQEPSLTVSPGGT | na | na |
| (Format: Whole | KISCKVSGYTLRGYWIEWV | VTLTCRSSTGAVTTSNYA | | |
| mAb) | RQAPGKGLEWIGQILPGT | NWFQQKPGQAPRTLIG | | |
| | GRTNYNEKFKGRVTMTA | GTNNRAPGVPARFSGSL | | |
| | DTSTDTAYMELSSLRSEDT | LGGKAALTLSGAQPEDEA | | |
| | AVYYCARFDGNYGYYAM | EYYCALWYSNHWVFGG | | |
| | DYWGQGTTVTVSS (SEQ | GTKLTVL (SEQ ID NO: | | |
| | ID NO: 131) | 132) | | |
| Budigalimab | EIQLVQSGAEVKKPGSSVK | DVVMTQSPLSLPVTPGE | na | na |
| (Format: Whole | VSCKASGYTFTHYGMNW | PASISCRSSQSIVHSHGDT | | |
| mAb) | VRQAPGQGLEWVGWVN | YLEWYLQKPGQSPQLLIY | | |
| | TYTGEPTYADDFKGRLTFT | KVSNRFSGVPDRFSGSGS | | |
| | LDTSTSTAYMELSSLRSED | GTDFTLKISRVEAEDVGV | | |
| | TAVYYCTREGEGLGFGDW | YYCFQGSHIPVTFGQGTK | | |
| | GQGTTVTVSS (SEQ ID | LEIK (SEQ ID NO: 134) | | |
| | NO: 133) | | | |
| Burosumab | QVQLVQSGAEVKKPGASV | AIQLTQSPSSLSASVGDR | na | na |
| (Format: Whole | KVSCKASGYTFTNHYMH | VTITCRASQGISSALVWY | | |
| mAb) | WVRQAPGQGLEWMGIIN | QQKPGKAPKLLIYDASSL | | |
| | PISGSTSNAQKFQGRVTM | ESGVPSRFSGSGSGTDFT | | |
| | TRDTSTSTVYMELSSLRSE | LTISSLQPEDFATYYCQQF | | |
| | DTAVYYCARDIVDAFDFW | NDYFTFGPGTKVDIK | | |
| | GQGTMVTVSS (SEQ ID | (SEQ ID NO: 136) | | |
| | NO: 135) | | | |
| Cabiralizumab | QVQLVQSGAEVKKPGSSV | EIVLTQSPATLSLSPGERA | na | na |
| (Format: Whole | KVSCKASGYTFTDNYMIW | TLSCKASQSVDYDGDNY | | |
| mAb) | VRQAPGQGLEWMGDINP | MNWYQQKPGQAPRLLI | | |
| | YNGGTTFNQKFKGRVTIT | YAASNLESGIPARFSGSG | | |
| | ADKSTSTAYMELSSLRSED | SGTDFTLTISSLEPEDFAV | | |
| | TAVYYCARESPYFSNLYVM | YYCHLSNEDLSTFGGGTK | | |
| | DYWGQGTLVTVSS (SEQ | VEIK (SEQ ID NO: 138) | | |
| | ID NO: 137) | | | |
| Camidanlumab | QVQLVQSGAEVKKPGSSV | EIVLTQSPGTLSLSPGERA | na | na |
| (Format: Whole | KVSCKASGGTFSRYIINWV | TLSCRASQSVSSYLAWYQ | | |
| mAb ADC) | RQAPGQGLEWMGRIIPIL | QKPGQAPRLLIYGASSRA | | |
| | GVENYAQKFQGRVTITAD | TGIPDRFSGSGSGTDFTL | | |
| | KSTSTAYMELSSLRSEDTA | TISRLEPEDFAVYYCQQY | | |
| | VYYCARKDWFDYWGQGT | GSSPLTFGGGTKVEIK | | |
| | LVTVSS (SEQ ID NO: 139) | (SEQ ID NO: 140) | | |
| Camrelizumab | EVQLVESGGGLVQPGGSL | DIQMTQSPSSLSASVGD | na | na |
| (Format: Whole | RLSCAASGFTFSSYMMSW | RVTITCLASQTIGTWLTW | | |
| mAb) | VRQAPGKGLEWVATISGG | YQQKPGKAPKLLIYTATSL | | |
| | GANTYYPDSVKGRFTISRD | ADGVPSRFSGSGSGTDFT | | |
| | NAKNSLYLQMNSLRAEDT | LTISSLQPEDFATYYCQQ | | |
| | AVYYCARQLYYFDYWGQ | VYSIPWTFGGGTKVEIK | | |
| | GTTVTVSS (SEQ ID NO: | (SEQ ID NO: 142) | | |
| | 141) | | | |
| Canakinumab | QVQLVESGGGVVQPGRSL | EIVLTQSPDFQSVTPKEK | na | na |
| (Format: Whole | RLSCAASGFTFSVYGMNW | VTITCRASQSIGSSLHWY | | |
| mAb) | VRQAPGKGLEWVAIIWYD | QQKPDQSPKLLIKYASQS | | |
| | GDNQYYADSVKGRFTISR | FSGVPSRFSGSGSGTDFT | | |
| | DNSKNTLYLQMNGLRAED | LTINSLEAEDAAAYYCHQ | | |
| | TAVYYCARDLRTGPFDYW | SSSLPFTFGPGTKVDIK | | |
| | GQGTLVTVSS (SEQ ID | (SEQ ID NO: 144) | | |
| | NO: 143) | | | |
| Cantuzumab | QVQLVQSGAEVKKPGETV | DIVMTQSPLSVPVTPGEP | na | na |
| (Format: Whole | KISCKASDYTFTYYGMNW | VSISCRSSKSLLHSNGNTY | | |
| mAb ADC) | VKQAPGQGLKWMGWID | LYWFLQRPGQSPQLLIYR | | |
| | TTTGEPTYAQKFQGRIAFS | MSNLVSGVPDRFSGSGS | | |
| | LETSASTAYLQIKSLKSEDT | GTAFTLRISRVEAEDVGV | | |
| | ATYFCARRGPYNWYFDV | YYCLQHLEYPFTFGPGTK | | |
| | WGQGTTVTVSS (SEQ ID | LELK (SEQ ID NO: 146) | | |
| | NO: 145) | | | |
| Caplacizumab | EVQLVESGGGLVQPGGSL | na | na | na |
| (Format: | RLSCAASGRTFSYNPMG | | | |
| Nanobody) | WFRQAPGKGRELVAAISR | | | |
| | TGGSTYYPDSVEGRFTISR | | | |
| | DNAKRMVYLQMNSLRAE | | | |
| | DTAVYYCAAAGVRAEDGR | | | |
| | VRTLPSEYTFWGQGTQVT | | | |
| | VSS (SEQ ID NO: 147) | | | |
| Carlumab | QVQLVQSGAEVKKPGSSV | EIVLTQSPATLSLSPGERA | na | na |
| (Format: Whole | KVSCKASGGTFSSYGISWV | TLSCRASQSVSDAYLAWY | | |
| mAb) | RQAPGQGLEWMGGIIPIF | QQKPGQAPRLLIYDASSR | | |
| | GTANYAQKFQGRVTITAD | ATGVPARFSGSGSGTDFT | | |
| | ESTSTAYMELSSLRSEDTA | LTISSLEPEDFAVYYCHQY | | |
| | VYYCARYDGIYGELDFWG | IQLHSFTFGQGTKVEIK | | |
| | QGTLVTVSS (SEQ ID NO: | (SEQ ID NO: 149) | | |
| | 148) | | | |
| Carotuximab | EVKLEESGGGLVQPGGSM | QIVLSQSPAILSASPGEKV | na | na |
| (Format: Whole | KLSCAASGFTFSDAWMD | TMTCRASSSVSYMHWY | | |
| mAb) | WVRQSPEKGLEWVAEIRS | QQKPGSSPKPWIYATSNL | | |
| | KASNHATYYAESVKGRFTI | ASGVPVRFSGSGSGTSYS | | |
| | SRDDSKSSVYLQMNSLRA | LTISRVEAEDAATYYCQQ | | |
| | EDTGIYYCTRWRRFFDSW | WSSNPLTFGAGTKLELK | | |
| | GQGTTLTVSS (SEQ ID | (SEQ ID NO: 151) | | |
| | NO: 150) | | | |
| Cemiplimab | EVQLLESGGVLVQPGGSL | DIQMTQSPSSLSASVGDS | na | na |
| (Format: Whole | RLSCAASGFTFSNFGMTW | ITITCRASLSINTFLNWYQ | | |
| mAb) | VRQAPGKGLEWVSGISGG | QKPGKAPNLLIYAASSLH | | |
| | GRDTYFADSVKGRFTISRD | GGVPSRFSGSGSGTDFTL | | |
| | NSKNTLYLQMNSLKGEDT | TIRTLQPEDFATYYCQQS | | |
| | AVYYCVKWGNIYFDYWG | SNTPFTFGPGTVVDFR | | |
| | QGTLVTVSS (SEQ ID NO: | (SEQ ID NO: 153) | | |
| | 152) | | | |
| Cendakimab | EVTLRESGPGLVKPTQTLT | DIQMTQSPSSLSASVGD | na | na |
| (Format: Whole | LTCTLYGFSLSTSDMGVD | RVTISCRASQDIRNYLNW | | |
| mAb) | WIRQPPGKGLEWLAHIW | YQQKPGKAPKLLIFYTSKL | | |
| | WDDVKRYNPALKSRLTISK | HSGVPSRFSGSGSGTDYT | | |
| | DTSKNQVVLKLTSVDPVD | LTISSLQPEDIATYYCQQG | | |
| | TATYYCARTVSSGYIYYAM | NTLPLTFGGGTKVEIK | | |
| | DYWGQGTLVTVSS (SEQ | (SEQ ID NO: 155) | | |
| | ID NO: 154) | | | |
| Cergutuzumab | QVQLVQSGAEVKKPGASV | DIQMTQSPSSLSASVGD | na | na |
| (Format: Whole | KVSCKASGYTFTEFGMNW | RVTITCKASAAVGTYVA | | |
| mAb Fusion) | VRQAPGQGLEWMGWIN | WYQQKPGKAPKLLIYSAS | | |
| | TKTGEATYVEEFKGRVTFT | YRKRGVPSRFSGSGSGTD | | |
| | TDTSTSTAYMELRSLRSDD | FTLTISSLQPEDFATYYCH | | |
| | TAVYYCARWDFAYYVEA | QYYTYPLFTFGQGTKLEIK | | |
| | MDYWGQGTTVTVSS | (SEQ ID NO: 157) | | |
| | (SEQ ID NO: 156) | | | |
| Certolizumab | EVQLVESGGGLVQPGGSL | DIQMTQSPSSLSASVGD | na | na |
| (Format: Fab) | RLSCAASGYVFTDYGMN | RVTITCKASQNVGTNVA | | |
| | WVRQAPGKGLEWMGWI | WYQQKPGKAPKALIYSA | | |
| | NTYIGEPIYADSVKGRFTFS | SFLYSGVPYRFSGSGSGT | | |
| | LDTSKSTAYLQMNSLRAE | DFTLTISSLQPEDFATYYC | | |
| | DTAVYYCARGYRSYAMDY | QQYNIYPLTFGQGTKVEI | | |
| | WGQGTLVTVSS (SEQ ID | K (SEQ ID NO: 159) | | |
| | NO: 158) | | | |
| Cetrelimab | QVQLVQSGAEVKKPGSSV | EIVLTQSPATLSLSPGERA | na | na |
| (Format: Whole | KVSCKASGGTFSSYAISWV | TLSCRASQSVRSYLAWYQ | | |
| mAb) | RQAPGQGLEWMGGIIPIF | QKPGQAPRLLIYDASNRA | | |
| | DTANYAQKFQGRVTITAD | TGIPARFSGSGSGTDFTLT | | |
| | ESTSTAYMELSSLRSEDTA | ISSLEPEDFAVYYCQQRN | | |
| | VYYCARPGLAAAYDTGSL | YWPLTFGQGTKVEIK | | |
| | DYWGQGTLVTVSS (SEQ | (SEQ ID NO: 161) | | |
| | ID NO: 160) | | | |
| Cetuximab | QVQLKQSGPGLVQPSQSL | DILLTQSPVILSVSPGERV | na | na |
| (Format: Whole | SITCTVSGFSLTNYGVHWV | SFSCRASQSIGTNIHWYQ | | |
| mAb) | RQSPGKGLEWLGVIWSG | QRTNGSPRLLIKYASESIS | | |
| | GNTDYNTPFTSRLSINKDN | GIPSRFSGSGSGTDFTLSI | | |
| | SKSQVFFKMNSLQSNDTA | NSVESEDIADYYCQQNN | | |
| | IYYCARALTYYDYEFAYWG | NWPTTFGAGTKLELK | | |
| | QGTLVTVSA (SEQ ID NO: | (SEQ ID NO: 163) | | |
| | 162) | | | |
| Cibisatamab | QVQLVQSGAEVKKPGASV | DIQMTQSPSSLSASVGD | QVQLVQSGAEVKK | QAVVTQEPSLTVS |
| (Format: | KVSCKASGYTFTEFGMNW | RVTITCKASAAVGTYVA | PGASVKVSCKASG | PGGTVTLTCGSST |
| Bispecific mAb | VRQAPGQGLEWMGWIN | WYQQKPGKAPKLLIYSAS | YTFTEFGMNWVR | GAVTTSNYANW |
| with Domain | TKTGEATYVEEFKGRVTFT | YRKRGVPSRFSGSGSGTD | QAPGQGLEWMG | VQEKPGQAFRGLI |
| Crossover) | TDTSTSTAYMELRSLRSDD | FTLTISSLQPEDFATYYCH | WINTKTGEATYVE | GGTNKRAPGTPA |
| | TAVYYCARWDFAYYVEA | QYYTYPLFTFGQGTKLEIK | EFKGRVTFTTDTST | RFSGSLLGGKAAL |
| | MDYWGQGTTVTVSS | (SEQ ID NO: 165) | STAYMELRSLRSDD | TLSGAQPEDEAEY |
| | (SEQ ID NO: 164) | | TAVYYCARWDFAY | YCALWYSNLWVF |
| | | | YVEAMDYWGQGT | GGGTKLTVL (SEQ |
| | | | TVTVSS (SEQ ID | ID NO: 167) |
| | | | NO: 166) | |
| Cinpanemab | EVQLVESGGGLVEPGGSL | SYELTQPPSVSVSPGQTA | na | na |
| (Format: Whole | RLSCAVSGFDFEKAWMS | RITCSGEALPMQFAHWY | | |
| mAb) | WVRQAPGQGLQWVARIK | QQRPGKAPVIVVYKDSER | | |
| | STADGGTTSYAAPVEGRFI | PSGVPERFSGSSSGTTAT | | |
| | ISRDDSRNMLYLQMNSLK | LTITGVQAEDEADYYCQS | | |
| | TEDTAVYYCTSAHWGQG | PDSTNTYEVFGGGTKLTV | | |
| | TLVTVSS (SEQ ID NO: | L (SEQ ID NO: 169) | | |
| | 168) | | | |
| Citatuzumab | EVQLVQSGPGLVQPGGSV | DIQMTQSPSSLSASVGD | na | na |
| (Format: Fab | RISCAASGYTFTNYGMNW | RVTITCRSTKSLLHSNGIT | | |
| Fusion) | VKQAPGKGLEWMGWIN | YLYWYQQKPGKAPKLLIY | | |
| | TYTGESTYADSFKGRFTFSL | QMSNLASGVPSRFSSSG | | |
| | DTSASAAYLQINSLRAEDT | SGTDFTLTISSLQPEDFAT | | |
| | AVYYCARFAIKGDYWGQG | YYCAQNLEIPRTFGQGTK | | |
| | TLLTVSS (SEQ ID NO: | VELK (SEQ ID NO: 171) | | |
| | 170) | | | |
| Cixutumumab | EVQLVQSGAEVKKPGSSV | SSELTQDPAVSVALGQTV | na | na |
| (Format: Whole | KVSCKASGGTFSSYAISWV | RITCQGDSLRSYYATWYQ | | |
| mAb) | RQAPGQGLEWMGGIIPIF | QKPGQAPILVIYGENKRP | | |
| | GTANYAQKFQGRVTITAD | SGIPDRFSGSSSGNTASLT | | |
| | KSTSTAYMELSSLRSEDTA | ITGAQAEDEADYYCKSRD | | |
| | VYYCARAPLRFLEWSTQD | GSGQHLVFGGGTKLTVL | | |
| | HYYYYYMDVWGKGTTVT | (SEQ ID NO: 173) | | |
| | VSS (SEQ ID NO: 172) | | | |
| Clazakizumab | EVQLVESGGGLVQPGGSL | AIQMTQSPSSLSASVGDR | na | na |
| (Format: Whole | RLSCAASGFSLSNYYVTWV | VTITCQASQSINNELSWY | | |
| mAb) | RQAPGKGLEWVGIIYGSD | QQKPGKAPKLLIYRASTL | | |
| | ETAYATSAIGRFTISRDNSK | ASGVPSRFSGSGSGTDFT | | |
| | NTLYLQMNSLRAEDTAVY | LTISSLQPDDFATYYCQQ | | |
| | YCARDDSSDWDAKFNLW | GYSLRNIDNAFGGGTKVE | | |
| | GQGTLVTVSS (SEQ ID | IK (SEQ ID NO: 175) | | |
| | NO: 174) | | | |
| Clervonafusp | EVQLQESGGGVVQPGGSL | DIQMTQSPSSLSASVGD | na | na |
| (Format: di-Fab | RLSCAASGFTFSNYGMH | RVTISCRASKSVSTSSYSY | | |
| Fusion) | WIRQAPGKGLEWVSYISS | MHWYQQKPEKALIKYAS | | |
| | GSSTIYYADSVKGRFTISRD | YLQSGVPSRFSGSGSGTD | | |
| | NSKNTLYLQMNSLRSEDT | FTLTISSLQPEDVATYYCQ | | |
| | AVYYCARRGLLLDYWGQG | HSRETFGAGTKLELK | | |
| | TLVTVSS (SEQ ID NO: | (SEQ ID NO: 177) | | |
| | 176) | | | |
| Clivatuzumab | QVQLQQSGAEVKKPGAS | DIQLTQSPSSLSASVGDR | na | na |
| (Format: Whole | VKVSCEASGYTFPSYVLH | VTMTCSASSSVSSSYLYW | | |
| mAb | WVKQAPGQGLEWIGYIN | YQQKPGKAPKLWIYSTS | | |
| Radiolabelled) | PYNDGTQYNEKFKGKATL | NLASGVPARFSGSGSGT | | |
| | TRDTSINTAYMELSRLRSD | DFTLTISSLQPEDSASYFC | | |
| | DTAVYYCARGFGGSYGFA | HQWNRYPYTFGGGTRLE | | |
| | YWGQGTLVTVSS (SEQ ID | IK (SEQ ID NO: 179) | | |
| | NO: 178) | | | |
| Cobolimab | EVQLLESGGGLVQPGGSL | DIQMTQSPSSLSASVGD | na | na |
| (Format: Whole | RLSCAAASGFTFSSYDMS | RVTITCRASQSIRRYLNW | | |
| mAb) | WVRQAPGKGLDWVSTIS | YHQKPGKAPKLLIYGAST | | |
| | GGGTYTYYQDSVKGRFTIS | LQSGVPSRFSGSGSGTDF | | |
| | RDNSKNTLYLQMNSLRAE | TLTISSLQPEDFAVYYCQ | | |
| | DTAVYYCASMDYWGQGT | QSHSAPLTFGGGTKVEIK | | |
| | TVTVSS (SEQ ID NO: 180) | (SEQ ID NO: 181) | | |
| Codrituzumab | QVQLVQSGAEVKKPGASV | DVVMTQSPLSLPVTPGE | na | na |
| (Format: Whole | KVSCKASGYTFTDYEMHW | PASISCRSSQSLVHSNRN | | |
| mAb) | VRQAPGQGLEWMGALD | TYLHWYLQKPGQSPQLLI | | |
| | PKTGDTAYSQKFKGRVTLT | YKVSNRFSGVPDRFSGSG | | |
| | ADKSTSTAYMELSSLTSED | SGTDFTLKISRVEAEDVG | | |
| | TAVYYCTRFYSYTYWGQG | VYYCSQNTHVPPTFGQG | | |
| | TLVTVSS (SEQ ID NO: | TKLEIK (SEQ ID NO: | | |
| | 182) | 183) | | |
| Cofetuzumab | QVQLVQSGPEVKKPGASV | EIVLTQSPATLSLSPGERA | na | na |
| (Format: Whole | KVSCKASGYTFTDYAVHW | TLSCRASESVDSYGKSFM | | |
| mAb ADC) | VRQAPGKRLEWIGVISTYN | HWYQQKPGQAPRLLIYR | | |
| | DYTYNNQDFKGRVTMTR | ASNLESGIPARFSGSGSG | | |
| | DTSASTAYMELSRLRSEDT | TDFTLTISSLEPEDFAVYY | | |
| | AVYYCARGNSYFYALDYW | CQQSNEDPWTFGGGTK | | |
| | GQGTSVTVSS (SEQ ID | LEIK (SEQ ID NO: 185) | | |
| | NO: 184) | | | |
| Coltuximab | QVQLVQPGAEVVKPGAS | EIVLTQSPAIMSASPGER | na | na |
| (Format: Whole | VKLSCKTSGYTFTSNWMH | VTMTCSASSGVNYMHW | | |
| mAb ADC) | WVKQAPGQGLEWIGEID | YQQKPGTSPRRWIYDTS | | |
| | PSDSYTNYNQNFQGKAKL | KLASGVPARFSGSGSGTD | | |
| | TVDKSTSTAYMEVSSLRSD | YSLTISSMEPEDAATYYC | | |
| | DTAVYYCARGSNPYYYAM | HQRGSYTFGGGTKLEIK | | |
| | DYWGQGTSVTVSS (SEQ | (SEQ ID NO: 187) | | |
| | ID NO: 186) | | | |
| Conatumumab | QVQLQESGPGLVKPSQTL | EIVLTQSPGTLSLSPGERA | na | na |
| (Format: Whole | SLTCTVSGGSISSGDYFWS | TLSCRASQGISRSYLAWY | | |
| mAb) | WIRQLPGKGLEWIGHIHN | QQKPGQAPSLLIYGASSR | | |
| | SGTTYYNPSLKSRVTISVDT | ATGIPDRFSGSGSGTDFT | | |
| | SKKQFSLRLSSVTAADTAV | LTISRLEPEDFAVYYCQQF | | |
| | YYCARDRGGDYYYGMDV | GSSPWTFGQGTKVEIK | | |
| | WGQGTTVTVSS (SEQ ID | (SEQ ID NO: 189) | | |
| | NO: 188) | | | |
| Concizumab | EVQLVESGGGLVKPGGSL | DIVMTQTPLSLSVTPGQP | na | na |
| (Format: Whole | RLSCAASGFTFSNYAMSW | ASISCKSSQSLLESDGKTY | | |
| mAb) | VRQTPEKRLEWVATISRSG | LNWYLQKPGQSPQLLIYL | | |
| | SYSYFPDSVQGRFTISRDN | VSILDSGVPDRFSGSGSG | | |
| | AKNSLYLQMNSLRAEDTA | TDFTLKISRVEAEDVGVY | | |
| | VYYCARLGGYDEGDAMD | YCLQATHFPQTFGGGTK | | |
| | SWGQGTTVTVSS (SEQ ID | VEIK (SEQ ID NO: 191) | | |
| | NO: 190) | | | |
| Cosfroviximab | DVKLLESGGGLVQPGGSL | DIVMTQSPLSLSTSVGDR | na | na |
| (Format: Whole | KLSCAASGFSLSTSGVGVG | VSLTCKASQNVGTAVAW | | |
| mAb) | WFRQPSGKGLEWLALIW | YQQKPGQSPKLLIYSASN | | |
| | WDDDKYYNPSLKSQLSISK | RYTGVPDRFTGSGSGTDF | | |
| | DFSRNQVFLKISNVDIADT | TLTISNMQSEDLADYFCQ | | |
| | ATYYCARRDPFGYDNAM | QYSSYPLTFGAGTKLELR | | |
| | GYWGQGTSVTVSS (SEQ | (SEQ ID NO: 193) | | |
| | ID NO: 192) | | | |
| Crenezumab | EVQLVESGGGLVQPGGSL | DIVMTQSPLSLPVTPGEP | na | na |
| (Format: Whole | RLSCAASGFTFSSYGMSW | ASISCRSSQSLVYSNGDTY | | |
| mAb) | VRQAPGKGLELVASINSN | LHWYLQKPGQSPQLLIYK | | |
| | GGSTYYPDSVKGRFTISRD | VSNRFSGVPDRFSGSGS | | |
| | NAKNSLYLQMNSLRAEDT | GTDFTLKISRVEAEDVGV | | |
| | AVYYCASGDYWGQGTTV | YYCSQSTHVPWTFGQGT | | |
| | TVSS (SEQ ID NO: 194) | KVEIK | | |
| | | (SEQ ID NO: 195) | | |
| Crizanlizumab | QVQLVQSGAEVKKPGASV | DIQMTQSPSSLSASVGD | na | na |
| (Format: Whole | KVSCKVSGYTFTSYDINWV | RVTITCKASQSVDYDGHS | | |
| mAb) | RQAPGKGLEWMGWIYPG | YMNWYQQKPGKAPKLLI | | |
| | DGSIKYNEKFKGRVTMTV | YAASNLESGVPSRFSGSG | | |
| | DKSTDTAYMELSSLRSEDT | SGTDFTLTISSLQPEDFAT | | |
| | AVYYCARRGEYGNYEGA | YYCQQSDENPLTFGGGT | | |
| | MDYWGQGTLVTVSS | KVEIK | | |
| | (SEQ ID NO: 196) | (SEQ ID NO: 197) | | |
| Crotedumab | EVQLVESGGGLVQPGGSL | DIQMTQSPSSLSASVGD | na | na |
| (Format: Whole | RLSCAASGFTFSNYLMNW | RVTITCRASQGIRNDLG | | |
| mAb) | VRQAPGKGLEWLANIQED | WYQQKPGKAPKRLIYAA | | |
| | GIEKYYVDSVKGRFTISRD | SSLQSGVPSRFSGSGSGT | | |
| | NAKNSLYLQMNSLRAEDT | EFILTVSSLQPEDFATYYC | | |
| | AVYYCAREPSHYDILTGYD | LQYNSNPFTFGPGTKVDI | | |
| | YYYGMDVWGQGTTVTVS | K (SEQ ID NO: 199) | | |
| | S (SEQ ID NO: 198) | | | |
| Crovalimab | QVQLVESGGGLVQPGRSL | DIQMTQSPSSLSASVGD | na | na |
| (Format: Whole | RLSCAASGFTVHSSYYMA | RVTITCRASQGISSSLAW | | |
| mAb) | WVRQAPGKGLEWVGAIF | YQQKPGKAPKLLIYGASE | | |
| | TGSGAEYKAEWAKGRVTI | TESGVPSRFSGSGSGTDF | | |
| | SKDTSKNQVVLTMTNMD | TLTISSLQPEDFATYYCQN | | |
| | PVDTATYYCASDAGYDYP | TKVGSSYGNTFGGGTKV | | |
| | THAMHYWGQGTLVTVSS | EIK (SEQ ID NO: 201) | | |
| | (SEQ ID NO: 200) | | | |
| Cusatuzumab | EVQLVESGGGLVQPGGSL | QAVVTQEPSLTVSPGGT | na | na |
| (Format: Whole | RLSCAASGFTFSVYYMNW | VTLTCGLKSGSVTSDNFP | | |
| mAb) | VRQAPGKGLEWVSDINNE | TWYQQTPGQAPRLLIYN | | |
| | GGTTYYADSVKGRFTISRD | TNTRHSGVPDRFSGSILG | | |
| | NSKNSLYLQMNSLRAEDT | NKAALTITGAQADDEAEY | | |
| | AVYYCARDAGYSNHVPIF | FCALFISNPSVEFGGGTQ | | |
| | DSWGQGTLVTVSS (SEQ | LTVL (SEQ ID NO: 203) | | |
| | ID NO: 202) | | | |
| Dacetuzumab | EVQLVESGGGLVQPGGSL | DIQMTQSPSSLSASVGD | na | na |
| (Format: Whole | RLSCAASGYSFTGYYIHWV | RVTITCRSSQSLVHSNGN | | |
| mAb) | RQAPGKGLEWVARVIPNA | TFLHWYQQKPGKAPKLLI | | |
| | GGTSYNQKFKGRFTLSVD | YTVSNRFSGVPSRFSGSG | | |
| | NSKNTAYLQMNSLRAEDT | SGTDFTLTISSLQPEDFAT | | |
| | AVYYCAREGIYWWGQGT | YFCSQTTHVPWTFGQGT | | |
| | LVTVSS | KVEI | | |
| | (SEQ ID NO: 204) | (SEQ ID NO: 205) | | |
| Daclizumab | QVQLVQSGAEVKKPGSSV | DIQMTQSPSTLSASVGD | na | na |
| (Format: Whole | KVSCKASGYTFTSYRMHW | RVTITCSASSSISYMHWY | | |
| mAb) | VRQAPGQGLEWIGYINPS | QQKPGKAPKLLIYTTSNL | | |
| | TGYTEYNQKFKDKATITAD | ASGVPARFSGSGSGTEFT | | |
| | ESTNTAYMELSSLRSEDTA | LTISSLQPDDFATYYCHQ | | |
| | VYYCARGGGVFDYWGQG | RSTYPLTFGQGTKVEVK | | |
| | TLVTVSS (SEQ ID NO: | (SEQ ID NO: 207) | | |
| | 206) | | | |
| Dalotuzumab | QVQLQESGPGLVKPSETLS | DIVMTQSPLSLPVTPGEP | na | na |
| (Format: Whole | LTCTVSGYSITGGYLWNWI | ASISCRSSQSIVHSNGNTY | | |
| mAb) | RQPPGKGLEWIGYISYDGT | LQWYLQKPGQSPQLLIYK | | |
| | NNYKPSLKDRVTISRDTSK | VSNRLYGVPDRFSGSGS | | |
| | NQFSLKLSSVTAADTAVYY | GTDFTLKISRVEAEDVGV | | |
| | CARYGRVFFDYWGQGTL | YYCFQGSHVPWTFGQGT | | |
| | VTVSS | KVEIK | | |
| | (SEQ ID NO: 208) | (SEQ ID NO: 209) | | |
| Dapirolizumab | EVQLVESGGGLVQPGGSL | DIQMTQSPSSLSASVGD | na | na |
| (Format: Fab) | RLSCAVSGFSSTNYHVHW | RVTITCRASEDLYYNLAW | | |
| | VRQAPGKGLEWMGVIW | YQRKPGKAPKLLIYDTYRL | | |
| | GDGDTSYNSVLKSRFTISR | ADGVPSRFSGSGSGTDYT | | |
| | DTSKNTVYLQMNSLRAED | LTISSLQPEDFASYYCQQY | | |
| | TAVYYCARQLTHYYVLAA | YKFPFTFGQGTKVEIK | | |
| | WGQGTLVTVSS (SEQ ID | (SEQ ID | | |
| | NO: 210) | NO: 211) | | |
| Daratumumab | EVQLLESGGGLVQPGGSL | EIVLTQSPATLSLSPGERA | na | na |
| (Format: Whole | RLSCAVSGFTFNSFAMSW | TLSCRASQSVSSYLAWYQ | | |
| mAb) | VRQAPGKGLEWVSAISGS | QKPGQAPRLLIYDASNRA | | |
| | GGGTYYADSVKGRFTISRD | TGIPARFSGSGSGTDFTLT | | |
| | NSKNTLYLQMNSLRAEDT | ISSLEPEDFAVYYCQQRS | | |
| | AVYFCAKDKILWFGEPVFD | NWPPTFGQGTKVEIK | | |
| | YWGQGTLVTVSS (SEQ ID | (SEQ ID NO: 213) | | |
| | NO: 212) | | | |
| Dectrekumab | EVQLVESGGGVVQPGRSL | EIVLTQSPATLSLSPGERAI | na | na |
| (Format: Whole | RLSCAASGFTFSSYGMHW | LSCRAGQSVSSYLVWYQ | | |
| mAb) | VRQAPGKGLEWVAIIWYD | QKPGQAPRLLIYDASNRA | | |
| | GSNKYYADSVKGRFTISRD | TGIPARFSGSGSGTDFTLT | | |
| | NSKNTLYLQMNSLRAEDT | ISSLEPEDFAVYYCQQRSS | | |
| | AVYYCARLWFGDLDAFDI | WPPVYTFGQGTKLEIK | | |
| | WGQGTMVTVSS (SEQ ID | (SEQ ID NO: 215) | | |
| | NO: 214) | | | |
| Demcizumab | QVQLVQSGAEVKKPGASV | DIVMTQSPDSLAVSLGER | na | na |
| (Format: Whole | KISCKASGYSFTAYYIHWV | ATISCRASESVDNYGISF | | |
| mAb) | KQAPGQGLEWIGYISSYN | MKWFQQKPGQPPKLLIY | | |
| | GATNYNQKFKGRVTFTTD | AASNQGSGVPDRFSGSG | | |
| | TSTSTAYMELRSLRSDDTA | SGTDFTLTISSLQAEDVAV | | |
| | VYYCARDYDYDVGMDYW | YYCQQSKEVPWTFGGGT | | |
| | GQGTLVTVSS (SEQ ID | KVEIK (SEQ ID | | |
| | NO: 216) | NO: 217) | | |
| Denintuzumab | QVQLQESGPGLVKPSQTL | EIVLTQSPATLSLSPGERA | na | na |
| (Format: Whole | SLTCTVSGGSISTSGMGVG | TLSCSASSSVSYMHWYQ | | |
| mAb ADC) | WIRQHPGKGLEWIGHIW | QKPGQAPRLLIYDTSKLA | | |
| | WDDDKRYNPALKSRVTIS | SGIPARFSGSGSGTDFTLT | | |
| | VDTSKNQFSLKLSSVTAAD | ISSLEPEDVAVYYCFQGSV | | |
| | TAVYYCARMELWSYYFDY | YPFTFGQGTKLEIK (SEQ | | |
| | WGQGTLVTVSS (SEQ ID | ID | | |
| | NO: 218) | NO: 219) | | |
| Denosumab | EVQLLESGGGLVQPGGSL | EIVLTQSPGTLSLSPGERA | na | na |
| (Format: Whole | RLSCAASGFTFSSYAMSW | TLSCRASQSVRGRYLAW | | |
| mAb) | VRQAPGKGLEWVSGITGS | YQQKPGQAPRLLIYGASS | | |
| | GGSTYYADSVKGRFTISRD | RATGIPDRFSGSGSGTDF | | |
| | NSKNTLYLQMNSLRAEDT | TLTISRLEPEDFAVFYCQQ | | |
| | AVYYCAKDPGTTVIMSWF | YGSSPRTFGQGTKVEIK | | |
| | DPWGQGTLVTVSS (SEQ | (SEQ ID NO: 221) | | |
| | ID NO: 220) | | | |
| Depatuxizumab | QVQLQESGPGLVKPSQTL | DIQMTQSPSSMSVSVGD | na | na |
| (Format: Whole | SLTCTVSGYSISSDFAWN | RVTITCHSSQDINSNIGW | | |
| mAb ADC) | WIRQPPGKGLEWMGYISY | LQQKPGKSFKGLIYHGTN | | |
| | SGNTRYQPSLKSRITISRDT | LDDGVPSRFSGSGSGTDY | | |
| | SKNQFFLKLNSVTAADTAT | TLTISSLQPEDFATYYCVQ | | |
| | YYCVTAGRGFPYWGQGTL | YAQFPWTFGGGTKLEIK | | |
| | VTVSS (SEQ ID NO: 222) | (SEQ ID NO: 223) | | |
| Derlotuximab | QVQLKESGPGLVAPSQSLS | ENVLTQSPAIMSASPGEK | na | na |
| (Format: Whole | ITCTVSGFSLTDYGVRWIR | VTMTCRASSSVSSSYLH | | |
| mAb | QPPGKGLEWLGVIWGGG | WYQQKSGASPKLWIYST | | |
| Radiolabelled) | STYYNSALKSRLSISKDNSK | SNLASGVPARFSGSGSGT | | |
| | SQVFLKMNSLQTDDTAM | SYSLTISSVEAEDAATYYC | | |
| | YYCAKEKRRGYYYAMDY | QQYSGYPLTFGGGTKLEI | | |
| | WGQGTSVTVSS (SEQ ID | K (SEQ ID NO: 225) | | |
| | NO: 224) | | | |
| Dezamizumab | QVQLVQSGAEVKKPGSSV | DIQMTQSPSSLSASVGD | na | na |
| (Format: Whole | KVSCKASGFTFATYNMH | RVTITCRASENIYSYLAWY | | |
| mAb) | WVRQAPGQGLEWMGYI | QQKPGKAPKLLIHNAKTL | | |
| | YPGDGNANYNQQFKGRV | AEGVPSRFSGSGSGTDFT | | |
| | TITADKSTSTAYMELSSLRS | LTISSLQPEDFATYYCQH | | |
| | EDTAVYYCARGDFDYDGG | HYGAPLTFGQGTKLEIK | | |
| | YYFDSWGQGTLVTVSS | (SEQ ID NO: 227) | | |
| | (SEQ ID NO: 226) | | | |
| Dilpacimab | EVQLVESGGGLVQPGGSL | DIQMTQSPSSLSASVGD | EVQLVESGGGLVQ | DIQMTQSPSSLSA |
| (Format: | RLSCAASGFTFSNFPMAW | RVTITCRASEDIYSNLAW | PGGSLRLSCAASGY | SVGDRVTITCSAS |
| Bispecific | VRQAPGKGLEWVATISSS | YQQKPGKAPKLLIYDTNN | TFTNYGMNWVRQ | QDISNYLNWYQQ |
| mAb) | DGTTYYRDSVKGRFTISRD | LADGVPSRFSGSGSGTDF | APGKGLEWVGWI | KPGKAPKVLIYFTS |
| | NAKNSLYLQMNSLRAEDT | TLTISSLQPEDFATYYCQQ | NTYTGEPTYAADFK | SLHSGVPSRFSGS |
| | AVYYCARGYYNSPFAYWG | YNNYPPTFGQGTKLEIK | RRFTFSLDTSKSTAY | GSGTDFTLTISSLQ |
| | QGTLVTVSS (SEQ ID | (SEQ ID NO: 229) | LQMNSLRAEDTAV | PEDFATYYCQQYS |
| | NO: 228) | | YYCAKYPHYYGSSH | TVPWTFGQGTKV |
| | | | WYFDVWGQGTLV | EIK (SEQ ID NO: |
| | | | TVSS (SEQ ID NO: | 231) |
| | | | 230) | |
| Dinutuximab | EVQLLQSGPELEKPGASV | EIVMTQSPATLSVSPGER | na | na |
| (Format: Whole | MISCKASGSSFTGYNMN | ATLSCRSSQSLVHRNGNT | | |
| mAb) | WVRQNIGKSLEWIGAIDP | YLHWYLQKPGQSPKLLIH | | |
| | YYGGTSYNQKFKGRATLT | KVSNRFSGVPDRFSGSGS | | |
| | VDKSSSTAYMHLKSLTSED | GTDFTLKISRVEAEDLGVY | | |
| | SAVYYCVSGMEYWGQGT | FCSQSTHVPPLTFGAGTK | | |
| | SVTVSS | LELK | | |
| | (SEQ ID NO: 232) | (SEQ ID NO: 233) | | |
| Diridavumab | EVQLVESGAEVKKPGSSVK | QSVLTQPPSVSAAPGQK | na | na |
| (Format: Whole | VSCKASGGPFRSYAISWVR | VTISCSGSSSNIGNDYVS | | |
| mAb) | QAPGQGPEWMGGIIPIFG | WYQQLPGTAPKLLIYDN | | |
| | TTKYAPKFQGRVTITADDF | NKRPSGIPDRFSGSKSGT | | |
| | AGTVYMELSSLRSEDTAM | SATLGITGLQTGDEANYY | | |
| | YYCAKHMGYQVRETMDV | CATWDRRPTAYVVFGG | | |
| | WGKGTTVTVSS (SEQ ID | GTKLTVL (SEQ ID NO: | | |
| | NO: 234) | 235) | | |
| Disitamab | EVQLVQSGAEVKKPGATV | DIQMTQSPSSVSASVGD | na | na |
| (Format: Whole | KISCKVSGYTFTDYYIHWV | RVTITCKASQDVGTAVA | | |
| mAb ADC) | QQAPGKGLEWMGRVNP | WYQQKPGKAPKLLIYWA | | |
| | DHGDSYYNQKFKDKATIT | SIRHTGVPSRFSGSGSGT | | |
| | ADKSTDTAYMELSSLRSED | DFTLTISSLQPEDFATYYC | | |
| | TAVYFCARNYLFDHWGQ | HQFATYTFGGGTKVEIK | | |
| | GTLVTVSS (SEQ ID NO: | (SEQ ID NO: 237) | | |
| | 236) | | | |
| Domagrozumab | EVQLLESGGGLVQPGGSL | DIQMTQSPSSLSASVGD | na | na |
| (Format: Whole | RLSCAASGFTFSSYAMSW | RVTITCKASQDVSTAVA | | |
| mAb) | VRQAPGKGLEWVSTISSG | WYQQKPGKAPKLLIYSAS | | |
| | GSYTSYPDSVKGRFTISRD | YRYTGVPSRFSGSGSGTD | | |
| | NSKNTLYLQMNSLRAEDT | FTLTISSLQPEDFATYYCQ | | |
| | AVYYCAKQDYAMNYWG | QHYSTPWTFGGGTKVEI | | |
| | QGTLVTVSS (SEQ ID NO: | K (SEQ ID NO: 239) | | |
| | 238) | | | |
| Donanemab | QVQLVQSGAEVKKPGSSV | DIVMTQTPLSLSVTPGQP | na | na |
| (Format: Whole | KVSCKASGYDFTRYYINW | ASISCKSSQSLLYSRGKTY | | |
| mAb) | VRQAPGQGLEWMGWIN | LNWLLQKPGQSPQLLIYA | | |
| | PGSGNTKYNEKFKGRVTIT | VSKLDSGVPDRFSGSGSG | | |
| | ADESTSTAYMELSSLRSED | TDFTLKISRVEAEDVGVY | | |
| | TAVYYCAREGITVYWGQG | YCVQGTHYPFTFGQGTK | | |
| | TTVTVSS (SEQ ID NO: | LEIK (SEQ ID NO: 241) | | |
| | 240) | | | |
| Dostarlimab | EVQLLESGGGLVQPGGSL | DIQLTQSPSFLSAYVGDR | na | na |
| (Format: Whole | RLSCAASGFTFSSYDMSW | VTITCKASQDVGTAVAW | | |
| mAb) | VRQAPGKGLEWVSTISGG | YQQKPGKAPKLLIYWAST | | |
| | GSYTYYQDSVKGRFTISRD | LHTGVPSRFSGSGSGTEF | | |
| | NSKNTLYLQMNSLRAEDT | TLTISSLQPEDFATYYCQH | | |
| | AVYYCASPYYAMDYWGQ | YSSYPWTFGQGTKLEIK | | |
| | GTTVTVSS (SEQ ID NO: | (SEQ ID NO: 243) | | |
| | 242) | | | |
| Drozitumab | EVQLVQSGGGVERPGGSL | SELTQDPAVSVALGQTV | na | na |
| (Format: Whole | RLSCAASGFTFDDYAMSW | RITCSGDSLRSYYASWYQ | | |
| mAb) | VRQAPGKGLEWVSGINW | QKPGQAPVLVIYGANNR | | |
| | QGGSTGYADSVKGRVTIS | PSGIPDRFSGSSSGNTASL | | |
| | RDNAKNSLYLQMNSLRAE | TITGAQAEDEADYYCNSA | | |
| | DTAVYYCAKILGAGRGWY | DSSGNHVVFGGGTKLTV | | |
| | FDYWGKGTTVTVSS (SEQ | L (SEQ ID NO: 245) | | |
| | ID NO: 244) | | | |
| Duligotuzumab | EVQLVESGGGLVQPGGSL | DIQMTQSPSSLSASVGD | na | na |
| (Format: Whole | RLSCAASGFTLSGDWIHW | RVTITCRASQNIATDVA | | |
| mAb) | VRQAPGKGLEWVGEISAA | WYQQKPGKAPKLLIYSAS | | |
| | GGYTDYADSVKGRFTISAD | FLYSGVPSRFSGSGSGTD | | |
| | TSKNTAYLQMNSLRAEDT | FTLTISSLQPEDFATYYCQ | | |
| | AVYYCARESRVSFEAAMD | QSEPEPYTFGQGTKVEIK | | |
| | YWGQGTLVTVSS (SEQ ID | (SEQ ID NO: 247) | | |
| | NO: 246) | | | |
| Dupilumab | EVQLVESGGGLEQPGGSL | DIVMTQSPLSLPVTPGEP | na | na |
| (Format: Whole | RLSCAGSGFTFRDYAMTW | ASISCRSSQSLLYSIGYNYL | | |
| mAb) | VRQAPGKGLEWVSSISGS | DWYLQKSGQSPQLLIYLG | | |
| | GGNTYYADSVKGRFTISRD | SNRASGVPDRFSGSGSG | | |
| | NSKNTLYLQMNSLRAEDT | TDFTLKISRVEAEDVGFYY | | |
| | AVYYCAKDRLSITIRPRYYG | CMQALQTPYTFGQGTKL | | |
| | LDVWGQGTTVTVSS (SEQ | EIK (SEQ ID NO: 249) | | |
| | ID NO: 248) | | | |
| Durvalumab | EVQLVESGGGLVQPGGSL | EIVLTQSPGTLSLSPGERA | na | na |
| (Format: Whole | RLSCAASGFTFSRYWMS | TLSCRASQRVSSSYLAWY | | |
| mAb) | WVRQAPGKGLEWVANIK | QQKPGQAPRLLIYDASSR | | |
| | QDGSEKYYVDSVKGRFTIS | ATGIPDRFSGSGSGTDFT | | |
| | RDNAKNSLYLQMNSLRAE | LTISRLEPEDFAVYYCQQY | | |
| | DTAVYYCAREGGWFGELA | GSLPWTFGQGTKVEIK | | |
| | FDYWGQGTLVTVSS (SEQ | (SEQ ID NO: 251) | | |
| | ID NO: 250) | | | |
| Dusigitumab | QVQLVQSGAEVKKPGASV | QSVLTQPPSVSAAPGQK | na | na |
| (Format: Whole | KVSCKASGYTFTSYDINWV | VTISCSGSSSNIENNHVS | | |
| mAb) | RQATGQGLEWMGWMN | WYQQLPGTAPKLLIYDN | | |
| | PNSGNTGYAQKFQGRVT | NKRPSGIPDRFSGSKSGT | | |
| | MTRNTSISTAYMELSSLRS | SATLGITGLQTGDEADYY | | |
| | EDTAVYYCARDPYYYYYG | CETWDTSLSAGRVFGGG | | |
| | MDVWGQGTTVTVSS | TKLTVL (SEQ ID NO: | | |
| | (SEQ ID NO: 252) | 253) | | |
| Duvortuxizumab | QVTLRESGPALVKPTQTLT | ENVLTQSPATLSVTPGEK | EVQLVESGGGLVQ | QAVVTQEPSLTVS |
| (Format: | LTCTFSGFSLSTSGMGVG | ATITCRASQSVSYMHWY | PGGSLRLSCAASGF | PGGTVTLTCRSST |
| Bispecific scFv | WIRQPPGKALEWLAHIW | QQKPGQAPRLLIYDASN | TFSTYAMNWVRQ | GAVTTSNYANW |
| with Crossover) | WDDDKRYNPALKSRLTISK | RASGVPSRFSGSGSGTD | APGKGLEWVGRIR | VQQKPGQAPRGL |
| | DTSKNQVFLTMTNMDPV | HTLTISSLEAEDAATYYCF | SKYNNYATYYADS | IGGTNKRAPWTP |
| | DTATYYCARMELWSYYFD | QGSVYPFTFGQGTKLEIK | VKGRFTISRDDSKN | ARFSGSLLGGKAA |
| | YWGQGTTVTVSS (SEQ ID | (SEQ ID NO: 255) | SLYLQMNSLKTEDT | LTITGAQAEDEAD |
| | NO: 254) | | AVYYCVRHGNFGN | YYCALWYSNLWV |
| | | | SYVSWFAYWGQG | FGGGTKLTVL |
| | | | TLVTVSS (SEQ ID | (SEQ ID NO: 257) |
| | | | NO: 256) | |
| Eculizumab | QVQLVQSGAEVKKPGASV | DIQMTQSPSSLSASVGD | na | na |
| (Format: Whole | KVSCKASGYIFSNYWIOW | RVTITCGASENIYGALNW | | |
| mAb) | VRQAPGQGLEWMGEILP | YQQKPGKAPKLLIYGATN | | |
| | GSGSTEYTENFKDRVTMT | LADGVPSRFSGSGSGTDF | | |
| | RDTSTSTVYMELSSLRSED | TLTISSLQPEDFATYYCQN | | |
| | TAVYYCARYFFGSSPNWY | VLNTPLTFGQGTKVEIK | | |
| | FDVWGQGTLVTVSS (SEQ | (SEQ ID NO: 259) | | |
| | ID NO: 258) | | | |
| Edrecolomab | QVQLQQSGAELVRPGTSV | NIVMTQSPKSMSMSVG | na | na |
| (Format: Whole | KVSCKASGYAFTNYLIEWV | ERVTLTCKASENVVTYVS | | |
| mAb) | KQRPGQGLEWIGVINPGS | WYQQKPEQSPKLLIYGAS | | |
| | GGTNYNEKFKGKATLTAD | NRYTGVPDRFTGSGSAT | | |
| | KSSSTAYMQLSSLTSDDSA | DFTLTISSVQAEDLADYH | | |
| | VYFCARDGPWFAYWGQ | CGQGYSYPYTFGGGTKLE | | |
| | GTLVTVSA (SEQ ID NO: | IK (SEQ ID NO: 261) | | |
| | 260) | | | |
| Efalizumab | EVQLVESGGGLVQPGGSL | DIQMTQSPSSLSASVGD | na | na |
| (Format: Whole | RLSCAASGYSFTGHWMN | RVTITCRASKTISKYLAWY | | |
| mAb) | WVRQAPGKGLEWVGMI | QQKPGKAPKLLIYSGSTL | | |
| | HPSDSETRYNQKFKDRFTI | QSGVPSRFSGSGSGTDFT | | |
| | SVDKSKNTLYLQMNSLRA | LTISSLQPEDFATYYCQQ | | |
| | EDTAVYYCARG1YFYGTTY | HNEYPLTFGQGTKVEIK | | |
| | FDYWGQGTLVTVSS (SEQ | (SEQ ID NO: 263) | | |
| | ID NO: 262) | | | |
| Efungumab | MAEVQLVESGAEVKKPGE | DVVMTQSPSFLSAFVGD | na | na |
| (Format: scFv) | SLRISCKGSGCIISSYWISW | RITITCRASSGISRYLAWY | | |
| | VRQMPGKGLEWMGKIDP | QQAPGKAPKLLIYAASTL | | |
| | GDSYINYSPSFQGHVTISA | QTGVPSRFSGSGSGTEFT | | |
| | DKSINTAYLQWNSLKASD | LTINSLQPEDFATYYCQH | | |
| | TAMYYCARGGRDFGDSF | LNSYPLTFGGGTKVDIK | | |
| | DYWGQGTLVTVSS (SEQ | (SEQ ID NO: 265) | | |
| | ID NO: 264) | | | |
| Eldelumab | QMQLVESGGGVVQPGRS | EIVLTQSPGTLSLSPGERA | na | na |
| (Format: Whole | LRLSCTASGFTFSNNGMH | TLSCRASQSVSSSYLAWY | | |
| mAb) | WVRQAPGKGLEWVAVI | QQKPGQAPRLLIYGASSR | | |
| | WFDGMNKFYVDSVKGRF | ATGIPDRFSGSGSGTDFT | | |
| | TISRDNSKNTLYLEMNSLR | LTISRLEPEDFAVYYCQQY | | |
| | AEDTAIYYCAREGDGSGIY | GSSPIFTFGPGTKVDIK | | |
| | YYYGMDVWGQGTTVTVS | (SEQ ID NO: 267) | | |
| | S (SEQ ID NO: 266) | | | |
| Elezanumab | EVQLVQSGAEVKKPGASV | QSALTQPRSVSGSPGQS | na | na |
| (Format: Whole | KVSCKASGYTFTSHGISWV | VTISCTGTSSSVGDSIYVS | | |
| mAb) | RQAPGQGLDWMGWISP | WYQQHPGKAPKLMLYD | | |
| | YSGNTNYAQKLQGRVTM | VTKRPSGVPDRFSGSKSG | | |
| | TTDTSTSTAYMELSSLRSE | NTASLTISGLQAEDEADY | | |
| | DTAVYYCARVGSGPYYYM | YCYSYAGTDTLFGGGTKV | | |
| | DVWGQGTLVTVSS (SEQ | TVL (SEQ ID NO: 269) | | |
| | ID NO: 268) | | | |
| Elgemtumab | EVQLLESGGGLVQPGGSL | DIQMTQSPSSLSASVGD | na | na |
| (Format: Whole | RLSCAASGFTFSSYAMSW | RVTITCRASQGISNWLA | | |
| mAb) | VRQAPGKGLEWVSAINSQ | WYQQKPGKAPKLLIYGA | | |
| | GKSTYYADSVKGRFTISRD | SSLQSGVPSRFSGSGSGT | | |
| | NSKNTLYLQMNSLRAEDT | DFTLTISSLQPEDFATYYC | | |
| | AVYYCARWGDEGFDIWG | QQYSSFPTTFGQGTKVEI | | |
| | QGTLVTVSS (SEQ ID NO: | K (SEQ ID NO: 271) | | |
| | 270) | | | |
| Elipovimab | QMQLQESGPGLVKPSETL | SDISVAPGETARISCGEKS | na | na |
| (Format: Whole | SLTCSVSGASISDSYWSWI | LGSRAVQWYQHRAGQA | | |
| mAb) | RRSPGKGLEWIGYVHKSG | PSLIIYNNQDRPSGIPERF | | |
| | DTNYNPSLKSRVHLSLDTS | SGSPDSRPGTTATLTITSV | | |
| | KNQVSLSLTGVTAADSGK | EAGDEADYYCHIWDSRV | | |
| | YYCARTLHGRRIYGIVAFN | PTKWVFGGGTTLTVL | | |
| | EWFTYFYMDVWGTGTOV | (SEQ ID NO: 273) | | |
| | TVSS (SEQ ID NO: 272) | | | |
| Elotuzumab | EVQLVESGGGLVQPGGSL | DIQMTQSPSSLSASVGD | na | na |
| (Format: Whole | RLSCAASGFDFSRYWMS | RVTITCKASQDVGIAVA | | |
| mAb) | WVRQAPGKGLEWIGEINP | WYQQKPGKVPKLLIYWA | | |
| | DSSTINYAPSLKDKFIISRD | STRHTGVPDRFSGSGSGT | | |
| | NAKNSLYLQMNSLRAEDT | DFTLTISSLQPEDVATYYC | | |
| | AVYYCARPDGNYWYFDV | QQYSSYPYTFGQGTKVEI | | |
| | WGQGTLVTVSS (SEQ ID | K (SEQ ID NO: 275) | | |
| | NO: 274) | | | |
| Emactuzumab | QVQLVQSGAEVKKPGASV | DIQMTQSPSSLSASVGD | na | na |
| (Format: Whole | KVSCKASGYTFTSYDISWV | RVTITCRASEDVNTYVSW | | |
| mAb) | RQAPGQGLEWMGVIWT | YQQKPGKAPKLLIYAASN | | |
| | DGGTNYAQKLQGRVTMT | RYTGVPSRFSGSGSGTDF | | |
| | TDTSTSTAYMELRSLRSDD | TLTISSLQPEDFATYYCQQ | | |
| | TAVYYCARDQRLYFDVWG | SFSYPTFGQGTKLEIK | | |
| | QGTTVTVSS (SEQ ID NO: | (SEQ ID NO: 277) | | |
| | 276) | | | |
| Emapalumab | EVQLLESGGGLVQPGGSL | NFMLTQPHSVSESPGKT | na | na |
| (Format: Whole | RLSCAASGFTFSSYAMSW | VTISCTRSSGSIASNYVQ | | |
| mAb) | VRQAPGKGLEWVSAISGS | WYQQRPGSSPTTVIYED | | |
| | GGSTYYADSVKGRFTISRD | NQRPSGVPDRFSGSIDSS | | |
| | NSKNTLYLQMNSLRAEDT | SNSASLTISGLKTEDEADY | | |
| | AVYYCAKDGSSGWYVPH | YCQSYDGSNRWMFGGG | | |
| | WFDPWGQGTLVTVSS | TKLTVL (SEQ ID NO: | | |
| | (SEQ ID NO: 278) | 279) | | |
| Emicizumab | QVQLVQSGSELKKPGASV | DIQMTQSPSSLSASVGD | QVQLVESGGGLVQ | DIQMTQSPSSLSA |
| (Format: | KVSCKASGYTFTDNNMD | RVTITCKASRNIERQLAW | PGGSLRLSCAASGF | SVGDRVTITCKAS |
| Bispecific mAb) | WVRQAPGQGLEWMGDI | YQQKPGQAPELLIYQASR | TFSYYDIQWVRQA | RNIERQLAWYQQ |
| | NTRSGGSIYNEEFQDRVI | KESGVPDRFSGSRYGTDF | PGKGLEWVSSISPS | KPGQAPELLIYQA |
| | MTVDKSTDTAYMELSSLR | TLTISSLQPEDIATYYCQQ | GQSTYYRREVKGR | SRKESGVPDRFSG |
| | SEDTATYHCARRKSYGYYL | YSDPPLTFGGGTKVEIK | FTISRDNSKNTLYL | SRYGTDFTLTISSL |
| | DEWGEGTLVTVSS (SEQ | (SEQ ID NO: 281) | QMNSLRAEDTAVY | QPEDIATYYCQQY |
| | ID NO: 280) | | YCARRTGREYGGG | SDPPLTFGGGTKV |
| | | | WYFDYWGQGTLV | EIK (SEQ ID |
| | | | TVSS | NO: 283) |
| | | | (SEQ ID NO: 282) | |
| Emibetuzumab | QVQLVQSGAEVKKPGASV | DIQMTQSPSSLSASVGD | na | na |
| (Format: Whole | KVSCKASGYTFTDYYMHW | RVTITCSVSSSVSSIYLHW | | |
| mAb) | VRQAPGQGLEWMGRVN | YQQKPGKAPKLLIYSTSNL | | |
| | PNRRGTTYNQKFEGRVT | ASGVPSRFSGSGSGTDFT | | |
| | MTTDTSTSTAYMELRSLRS | LTISSLQPEDFATYYCQVY | | |
| | DDTAVYYCARANWLDYW | SGYPLTFGGGTKVEIK | | |
| | GQGTTVTVSS (SEQ ID | (SEQ ID NO: 285) | | |
| | NO: 284) | | | |
| Enapotamab | EVQLLESGGGLVQPGGSL | EIVLTQSPGTLSLSPGERA | na | na |
| (Format: Whole | RLSCAASGFTFSSYAMNW | TLSCRASQSVSSSYLAWY | | |
| mAb ADC) | VRQAPGKGLEWVSTTSGS | QQKPGQAPRLLIYGASSR | | |
| | GASTYYADSVKGRFTISRD | ATGIPDRFSGSGSGTDFT | | |
| | NSKNTLYLQMNSLRAEDT | LTISRLEPEDFAVYYCQQY | | |
| | AVYYCAKIWIAFDIWGQG | GSSPYTFGQGTKLEIK | | |
| | TMVTVSS (SEQ ID NO: | (SEQ ID NO: 287) | | |
| | 286) | | | |
| Enavatuzumab | EVQLVESGGGLVQPGGSL | DIQMTQSPSSLSASVGD | na | na |
| (Format: Whole | RLSCAASGFTFSSYWMSW | RVTITCRASQSVSTSSYSY | | |
| mAb) | VRQAPGKGLEWVAEIRLK | MHWYQQKPGKAPKLLIK | | |
| | SDNYATHYAESVKGRFTIS | YASNLESGVPSRFSGSGS | | |
| | RDDSKNSLYLQMNSLRAE | GTDFTLTISSLQPEDFATY | | |
| | DTAVYYCTGYYADAMDY | YCQHSWEIPYTFGGGTK | | |
| | WGQGTLVTVSS (SEQ ID | VEIK (SEQ ID NO: 289) | | |
| | NO: 288) | | | |
| Enfortumab | EVQLVESGGGLVQPGGSL | DIQMTQSPSSVSASVGD | na | na |
| (Format: Whole | RLSCAASGFTFSSYNMNW | RVTITCRASQGISGWLA | | |
| mAb ADC) | VRQAPGKGLEWVSYISSSS | WYQQKPGKAPKFLIYAA | | |
| | STIYYADSVKGRFTISRDNA | STLQSGVPSRFSGSGSGT | | |
| | KNSLSLQMNSLRDEDTAV | DFTLTISSLQPEDFATYYC | | |
| | YYCARAYYYGMDVWGQG | QQANSFPPTFGGGTKVEI | | |
| | TTVTVSS (SEQ ID NO: | K (SEQ ID NO: 291) | | |
| | 290) | | | |
| (Format: Whole | EVQLVESGGGLVQPGGSL | DIQLTQSPSFLSASVGDR | na | na |
| mAb) | RLSCAASGFTFSSFGMHW | VTITCKASQNVDTNVAW | | |
| | VRQAPGKGLEWVAYISSD | YQQKPGKAPKALIYSASY | | |
| | SSAIYYADTVKGRFTISRDN | RYSGVPSRFSGSGSGTDF | | |
| | AKNSLYLQMNSLRDEDTA | TLTISSLQPEDFATYYCQQ | | |
| | VYYCGRGRENIYYGSRLDY | YNNYPFTFGQGTKLEIK | | |
| | WGQGTTVTVSS (SEQ ID | (SEQ ID NO: 293) | | |
| | NO: 292) | | | |
| Enokizumab | QVQLVQSGAEVKKPGSSV | DIQMTQSPSSLSASVGD | na | na |
| (Format: Whole | KVSCKASGGTFSYYWIEW | RVTITCKASQHVITHVTW | | |
| mAb) | VRQAPGQGLEWMGEILP | YQQKPGKAPKLLIYGTSY | | |
| | GSGTTNPNEKFKGRVTITA | SYSGVPSRFSGSGSGTDF | | |
| | DESTSTAYMELSSLRSEDT | TLTISSLQPEDFATYYCQQ | | |
| | AVYYCARADYYGSDYVKF | FYEYPLTFGGGTKVEIK | | |
| | DYWGQGTLVTVSS (SEQ | (SEQ ID NO: 295) | | |
| | ID NO: 294) | | | |
| Enoticumab | QVQLVESGGGVVQPGRSL | EIVLTQSPATLSLSPGERA | na | na |
| (Format: Whole | RLSCAASGFTFSSYGMHW | TLSCRASQSVSSYLAWYQ | | |
| mAb) | VRQAPGKGLEWVSFLWY | QKPGQAPRLLIYDASNRA | | |
| | DGTNKNYVESVKGRFTISR | TGIPARFSGSGSGTDFTLT | | |
| | DNSKNMLYLEMNSLRAED | ISSLEPEDFAVYYCQHRS | | |
| | TAVYYCARDHDFRSGYEG | NWPPTFGGGTKVEIK | | |
| | WFDPWGQGTLVTVSS | (SEQ ID NO: 297) | | |
| | (SEQ ID NO: 296) | | | |
| Ensituximab | QVQLKESGPDLVAPSQSLS | QVVLTQSPVIMSASPGEK | na | na |
| (Format: Whole | ITCTVSGFSLSKFGVNWVR | VTMTCSASSSISYMYWY | | |
| mAb) | QPPGKGLEWLGVIWGDG | QQKPGTSPKRWIYDTSKL | | |
| | STSYNSGLISRLSISKENSKS | ASGVPARFSGSGSGTSYS | | |
| | QVFLKLNSLQADDTATYYC | LTISNMEAGDAATYYCH | | |
| | VKPGGDYWGHGTSVTVS | QRDSYPWTFGGGTNLEI | | |
| | S (SEQ ID NO: 298) | K (SEQ ID NO: 299) | | |
| Envafolimab | QVQLVESGGGLVQPGGSL | na | na | na |
| (Format: Single | RLSCAASGKMSSRRCMA | | | |
| Domain Variable | WFRQAPGKERERVAKLLT | | | |
| Fragment; H) | TSGSTYLADSVKGRFTISRD | | | |
| | NSKNTVYLQMNSLRAEDT | | | |
| | AVYYCAADSFEDPTCTLVT | | | |
| | SS (SEQ ID NO: 300) | | | |
| Epratuzumab | QVQLVQSGAEVKKPGSSV | DIQLTQSPSSLSASVGDR | na | na |
| (Format: Whole | KVSCKASGYTFTSYWLHW | VTMSCKSSQSVLYSANH | | |
| mAb) | VRQAPGQGLEWIGYINPR | KNYLAWYQQKPGKAPKL | | |
| | NDYTEYNQNFKDKATITA | LIYWASTRESGVPSRFSG | | |
| | DESTNTAYMELSSLRSEDT | SGSGTDFTFTISSLQPEDI | | |
| | AFYFCARRDITTFYWGQG | ATYYCHQYLSSWTFGGG | | |
| | TTVTVSS (SEQ ID NO: | TKLEIK (SEQ ID NO: | | |
| | 301) | 302) | | |
| Eptinezumab | EVQLVESGGGLVQPGGSL | QVLTQSPSSLSASVGDRV | na | na |
| (Format: Whole | RLSCAVSGIDLSGYYMNW | TINCQASQSVYHNTYLA | | |
| mAb) | VRQAPGKGLEWVGVIGIN | WYQQKPGKVPKQLIYDA | | |
| | GATYYASWAKGRFTISRD | STLASGVPSRFSGSGSGT | | |
| | NSKTTVYLQMNSLRAEDT | DFTLTISSLQPEDVATYYC | | |
| | AVYFCARGDIWGQGTLVT | LGSYDCTNGDCFVFGGG | | |
| | VSS (SEQ ID NO: 303) | TKVEIK (SEQ ID NO: | | |
| | | 304) | | |
| Erenumab | QVQLVESGGGVVQPGRSL | QSVLTQPPSVSAAPGQK | na | na |
| (Format: Whole | RLSCAASGFTFSSFGMHW | VTISCSGSSSNIGNNYVS | | |
| mAb) | VRQAPGKGLEWVAVISFD | WYQQLPGTAPKLLIYDN | | |
| | GSIKYSVDSVKGRFTISRD | NKRPSGIPDRFSGSKSGT | | |
| | NSKNTLFLQMNSLRAEDT | STTLGITGLQTGDEADYY | | |
| | AVYYCARDRLNYYDSSGYY | CGTWDSRLSAVVFGGGT | | |
| | HYKYYGMAVWGQGTTVT | KLTVL (SEQ ID NO: 306) | | |
| | VSS (SEQ ID NO: 305) | | | |
| Etaracizumab | QVQLVESGGGVVQPGRSL | EIVLTQSPATLSLSPGERA | na | na |
| (Format: Whole | RLSCAASGFTFSSYDMSW | TLSCQASQSISNFLHWYQ | | |
| mAb) | VRQAPGKGLEWVAKVSS | QRPGQAPRLLIRYRSQSIS | | |
| | GGGSTYYLDTVQGRFTISR | GIPARFSGSGSGTDFTLTI | | |
| | DNSKNTLYLQMNSLRAED | SSLEPEDFAVYYCQQSGS | | |
| | TAVYYCARHLHGSFASWG | WPLTFGGGTKVEIK (SEQ | | |
| | QGTTVTVSS (SEQ ID NO: | ID NO: 308) | | |
| | 307) | | | |
| Etigilimab | QVQLQESGPGLVKPSETLS | DIQMTQSPSSLSASVGD | na | na |
| (Format: Whole | LTCAVSGYSITSDYAWNW | RVTITCKASQDVSTAVA | | |
| mAb) | IRQPPGKGLEWIGYISYSG | WYQQKPGKAPKLLIYSAS | | |
| | STSYNPSLRSRVTISRDTSK | YRYTGVPSRFSGSGSGTD | | |
| | NQFFLKLSSVTAADTAVYY | FTFTISSLQPEDIATYYCQ | | |
| | CARRQVGLGFAYWGQGT | QHYSTPWTFGQGTKVEI | | |
| | LVTVSS (SEQ ID NO: 309) | K (SEQ ID NO: 310) | | |
| Etokimab | QVQLMQSGAEVKKPGAS | DIQLTQSPSFLSASVGDR | na | na |
| (Format: Whole | VKVSCKASGYTFTSYWMH | VTITCKASQDVGTAVAW | | |
| mAb) | WVRQAPGQGLEWMGTI | YQQKPGKAPKLLIYWAST | | |
| | YPRNSNTDYNQKFKARVT | RHTGVPSRFSGSGSGTEF | | |
| | MTRDTSTSTVYMELSSLRS | TLTISSLQPEDFATYYCQQ | | |
| | EDTAVYYCARPLYYYLTSPP | AKTYPFTFGSGTKLEIK | | |
| | TLFWGQGTLVTVSS (SEQ | (SEQ ID NO: 312) | | |
| | ID NO: 311) | | | |
| Etrolizumab | EVQLVESGGGLVQPGGSL | DIQMTQSPSSLSASVGD | na | na |
| (Format: Whole | RLSCAASGFFITNNYWGW | RVTITCRASESVDDLLHW | | |
| mAb) | VRQAPGKGLEWVGYISYS | YQQKPGKAPKLLIKYASQ | | |
| | GSTSYNPSLKSRFTISRDTS | SISGVPSRFSGSGSGTDFT | | |
| | KNTFYLQMNSLRAEDTAV | LTISSLQPEDFATYYCQQ | | |
| | YYCARTGSSGYFDFWGQG | GNSLPNTFGQGTKVEIK | | |
| | TLVTVSS (SEQ ID NO: | (SEQ ID NO: 314) | | |
| | 313) | | | |
| Evinacumab | EVQLVESGGGVIQPGGSL | DIQMTQSPSTLSASVGD | na | na |
| (Format: Whole | RLSCAASGFTFDDYAMN | RVTITCRASQSIRSWLAW | | |
| mAb) | WVRQGPGKGLEWVSAIS | YQQKPGKAPKLLIYKASSL | | |
| | GDGGSTYYADSVKGRFTIS | ESGVPSRFSGSGSGTEFT | | |
| | RDNSKNSLYLQMNSLRAE | LTISSLQPDDFATYYCQQ | | |
| | DTAFFYCAKDLRNTIFGVVI | YNSYSYTFGQGTKLEIK | | |
| | PDAFDIWGQGTMVTVSS | (SEQ ID NO: 316) | | |
| | (SEQ ID NO: 315) | | | |
| Evolocumab | EVQLVQSGAEVKKPGASV | ESALTQPASVSGSPGQSI | na | na |
| (Format: Whole | KVSCKASGYTLTSYGISWV | TISCTGTSSDVGGYNSVS | | |
| mAb) | RQAPGQGLEWMGWVSF | WYQQHPGKAPKLMIYEV | | |
| | YNGNTNYAQKLQGRGTM | SNRPSGVSNRFSGSKSG | | |
| | TTDPSTSTAYMELRSLRSD | NTASLTISGLQAEDEADY | | |
| | DTAVYYCARGYGMDVW | YCNSYTSTSMVFGGGTKL | | |
| | GQGTTVTVSS (SEQ ID | TVL (SEQ ID NO: 318) | | |
| | NO: 317) | | | |
| Faricimab | EVQLVESGGGLVQPGGSL | DIQLTQSPSSLSASVGDR | QVQLVQSGAEVKK | SYVLTQPPSVSVA |
| (Format: | RLSCAASGYDFTHYGMN | VTITCSASQDISNYLNWY | PGASVKVSCKASG | PGQTARITCGGN |
| Bispecific mAb) | WVRQAPGKGLEWVGWI | QQKPGKAPKVLIYFTSSL | YTFTGYYMHWVR | NIGSKSVHWYQQ |
| | NTYTGEPTYAADFKRRFTF | HSGVPSRFSGSGSGTDFT | QAPGQGLEWMG | KPGQAPVLVVYD |
| | SLDTSKSTAYLQMNSLRAE | LTISSLQPEDFATYYCQQY | WINPNSGGTNYA | DSDRPSGIPERFS |
| | DTAVYYCAKYPYYYGTSH | STVPWTFGQGTKVEIK | QKFQGRVTMTRD | GSNSGNTATLTIS |
| | WYFDVWGQGTLVTVSS | (SEQ ID NO: 320) | TSISTAYMELSRLRS | RVEAGDEADYYC |
| | (SEQ ID NO: 319) | | DDTAVYYCARSPN | QVWDSSSDHWV |
| | | | PYYYDSSGYYYPGA | FGGGTKLTVL |
| | | | FDIWGQGTMVTV | (SEQ ID NO: 322) |
| | | | SS (SEQ ID NO: | |
| | | | 321) | |
| Farletuzumab | EVQLVESGGGVVQPGRSL | DIQLTQSPSSLSASVGDR | na | na |
| (Format: Whole | RLSCSASGFTFSGYGLSWV | VTITCSVSSSISSNNLHWY | | |
| mAb) | RQAPGKGLEWVAMISSG | QQKPGKAPKPWIYGTSN | | |
| | GSYTYYADSVKGRFAISRD | LASGVPSRFSGSGSGTDY | | |
| | NAKNTLFLQMDSLRPEDT | TFTISSLQPEDIATYYCQQ | | |
| | GVYFCARHGDDPAWFAY | WSSYPYMYTFGQGTKVE | | |
| | WGQGTPVTVSS (SEQ ID | IK (SEQ ID NO: 324) | | |
| | NO: 323) | | | |
| Fasinumab | QVQLVQSGAEVKKPGASV | DIQMTQSPSSLSASAGD | na | na |
| (Format: Whole | KVSCKVSGFTLTELSIHWV | RVTITCRASQAIRNDLGW | | |
| mAb) | RQAPGKGLEWMGGFDPE | YQQKPGKAPKRLIYAAFN | | |
| | DGETIYAQKFQGRVTMTE | LQSGVPSRFSGSGSGTEF | | |
| | DTSTDTAYMELTSLRSEDT | TLTISSLQPEDLASYYCQQ | | |
| | AVYYCSTIFGVVTNFDNW | YNRYPWTFGQGTKVEIK | | |
| | GQGTLVTVSS (SEQ ID | (SEQ ID NO: 326) | | |
| | NO: 325) | | | |
| Fezakinumab | QVQLVQSGAEVKKPGASV | QAVLTQPPSVSGAPGQR | na | na |
| (Format: Whole | KVSCKASGYTFTNYYMH | VTISCTGSSSNIGAGYGV | | |
| mAb) | WVRQAPGQGLEWVGWI | HWYQQLPGTAPKLLIYG | | |
| | NPYTGSAFYAQKFRGRVT | DSNRPSGVPDRFSGSKS | | |
| | MTRDTSISTAYMELSRLRS | GTSASLAITGLQAEDEAD | | |
| | DDTAVYYCAREPEKFDSD | YYCQSYDNSLSGYVFGG | | |
| | DSDVWGRGTLVTVSS | GTQLTVL (SEQ ID NO: | | |
| | (SEQ ID NO: 327) | 328) | | |
| Ficlatuzumab | QVQLVQPGAEVKKPGTSV | DIVMTQSPDSLAMSLGE | na | na |
| (Format: Whole | KLSCKASGYTFTTYWMH | RVTLNCKASENVVSYVS | | |
| mAb) | WVRQAPGQGLEWIGEIN | WYQQKPGQSPKLLIYGA | | |
| | PTNGHTNYNQKFQGRATL | SNRESGVPDRFSGSGSAT | | |
| | TVDKSTSTAYMELSSLRSE | DFTLTISSVQAEDVADYH | | |
| | DTAVYYCARNYVGSIFDY | CGQSYNYPYTFGQGTKLE | | |
| | WGQGTLLTVSS (SEQ ID | IK (SEQ ID NO: 330) | | |
| | NO: 329) | | | |
| Figitumumab | EVQLLESGGGLVQPGGSL | DIQMTQFPSSLSASVGD | na | na |
| (Format: Whole | RLSCTASGFTFSSYAMNW | RVTITCRASQGIRNDLG | | |
| mAb) | VRQAPGKGLEWVSAISGS | WYQQKPGKAPKRLIYAA | | |
| | GGTTFYADSVKGRFTISRD | SRLHRGVPSRFSGSGSGT | | |
| | NSRTTLYLQMNSLRAEDT | EFTLTISSLQPEDFATYYCL | | |
| | AVYYCAKDLGWSDSYYYY | QHNSYPCSFGQGTKLEIK | | |
| | YGMDVWGQGTTVTVSS | (SEQ ID NO: 332) | | |
| | (SEQ ID NO: 331) | | | |
| Firivumab | QVQLVQSGAEVKMPGSS | EIVLTQSPATLSLSPGERA | na | na |
| (Format: Whole | VKVSCKTSGVFFSSHAISW | TLSCRASENIWNNLAWY | | |
| mAb) | VRQAPGQGLEWMGGISP | QQKPGQAPRLLISGASTG | | |
| | MFGTTHYAQKFQGRVTIT | ATGVPSRFRGSGSRTEFT | | |
| | ADQSTTTAYMELTSLTSED | LTISSLQSEDFAIYFCQQY | | |
| | TAVYYCARDGAGSYYPLN | NSWPRTFGPGTKVEIK | | |
| | WFDPWGQGTLVTVSS | (SEQ ID NO: 334) | | |
| | (SEQ ID NO: 333) | | | |
| Flanvotumab | QVQLVQSGSELKKPGASV | EIVLTQSPATLSLSPGERA | na | na |
| (Format: Whole | KISCKASGYTFTSYAMNW | TLSCRASQSVSSYLAWYQ | | |
| mAb) | VRQAPGQGLESMGWINT | QKPGQAPRLLIYDASNRA | | |
| | NTGNPTYAQGFTGRFVFS | TGIPARFSGSGSGTDFTLT | | |
| | MDTSVSTAYLQISSLKAED | ISSLEPEDFAVYYCQQRS | | |
| | TAIYYCAPRYSSSWYLDYW | NWLMYTFGQGTKLEIK | | |
| | GQGTLVTVSS (SEQ ID | (SEQ ID NO: 336) | | |
| | NO: 335) | | | |
| Fletikumab | QVQLVQSGAEVKRPGASV | AIQLTQSPSSLSASVGDR | na | na |
| (Format: Whole | KVSCKASGYTFTNDIIHWV | VTITCRASQGISSALAWY | | |
| mAb) | RQAPGQRLEWMGWINA | QQKPGKAPKLLIYDASSL | | |
| | GYGNTQYSQNFQDRVSIT | ESGVPSRFSGSGSGTDFT | | |
| | RDTSASTAYMELISLRSED | LTISSLQPEDFATYYCQQF | | |
| | TAVYYCAREPLWFGESSP | NSYPLTFGGGTKVEIK | | |
| | HDYYGMDVWGQGTTVT | (SEQ ID NO: 338) | | |
| | VSS (SEQ ID NO: 337) | | | |
| Flotetuzumab | EVQLVQSGAELKKPGASV | DFVMTQSPDSLAVSLGE | EVQLVESGGGLVQ | QAVVTQEPSLTVS |
| (Format: | KVSCKASGYTFTDYYMKW | RVTMSCKSSQSLLNSGN | PGGSLRLSCAASGF | PGGTVTLTCRSST |
| Bispecific scFv | VRQAPGQGLEWIGDIIPS | QKNYLTWYQQKPGQPP | TFSTYAMNWVRQ | GAVTTSNYANW |
| with Crossover) | NGATFYNQKFKGRVTITV | KLLIYWASTRESGVPDRF | APGKGLEWVGRIR | VQQKPGQAPRGL |
| | DKSTSTAYMELSSLRSEDT | SGSGSGTDFTLTISSLQAE | SKYNNYATYYADS | IGGTNKRAPWTP |
| | AVYYCARSHLLRASWFAY | DVAVYYCQNDYSYPYTF | VKDRFTISRDDSKN | ARFSGSLLGGKAA |
| | WGQGTLVTVSS (SEQ ID | GQGTKLEIK (SEQ ID NO: | SLYLQMNSLKTEDT | LTITGAQAEDEAD |
| | NO: 339) | 340) | AVYYCVRHGNFGN | YYCALWYSNLWV |
| | | | SYVSWFAYWGQG | FGGGTKLTVL |
| | | | TLVTVSS (SEQ ID | (SEQ ID NO: 342) |
| | | | NO: 341) | |
| Fontolizumab | QVQLVQSGAELKKPGSSV | DIQMTQSPSTLSASVGD | na | na |
| (Format: Whole | KVSCKASGYIFTSSWINWV | RVTITCKASENVDTYVSW | | |
| mAb) | KQAPGQGLEWIGRIDPSD | YQQKPGKAPKLLIYGASN | | |
| | GEVHYNQDFKDKATLTVD | RYTGVPSRFSGSGSGTDF | | |
| | KSTNTAYMELSSLRSEDTA | TLTISSLQPDDFATYYCG | | |
| | VYYCARGFLPWFADWGQ | QSYNYPFTFGQGTKVEV | | |
| | GTLVTVSS (SEQ ID NO: | K (SEQ ID NO: 344) | | |
| | 343) | | | |
| Foralumab | QVQLVESGGGVVQPGRSL | EIVLTQSPATLSLSPGERA | na | na |
| (Format: Whole | RLSCAASGFKFSGYGMH | TLSCRASQSVSSYLAWYQ | | |
| mAb) | WVRQAPGKGLEWVAVI | QKPGQAPRLLIYDASNRA | | |
| | WYDGSKKYYVDSVKGRFT | TGIPARFSGSGSGTDFTLT | | |
| | ISRDNSKNTLYLQMNSLRA | ISSLEPEDFAVYYCQQRS | | |
| | EDTAVYYCARQMGYWHF | NWPPLTFGGGTKVEIK | | |
| | DLWGRGTLVTVSS (SEQ | (SEQ ID NO: 346) | | |
| | ID NO: 345) | | | |
| Foravirumab | QVQLVESGGGAVQPGRSL | DIQMTQSPSSLSASVGD | na | na |
| (Format: Whole | RLSCAASGFTFSSYGMHW | RVTITCRASQGIRNDLG | | |
| mAb) | VRQAPGKGLEWVAVILYD | WYQQKPGKAPKLLIYAA | | |
| | GSDKFYADSVKGRFTISRD | SSLQSGVPSRFSGSGSGT | | |
| | NSKNTLYLQMNSLRAEDT | DFTLTISSLQPEDFATYYC | | |
| | AVYYCAKVAVAGTHFDY | QQLNSYPPTFGGGTKVEI | | |
| | WGQGTLVTVSS (SEQ ID | K (SEQ ID NO: 348) | | |
| | NO: 347) | | | |
| Fremanezumab | EVQLVESGGGLVQPGGSL | EIVLTQSPATLSLSPGERA | na | na |
| (Format: Whole | RLSCAASGFTFSNYWISW | TLSCKASKRVTTYVSWYQ | | |
| mAb) | VRQAPGKGLEWVAEIRSE | QKPGQAPRLLIYGASNRY | | |
| | SDASATHYAEAVKGRFTIS | LGIPARFSGSGSGTDFTLT | | |
| | RDNAKNSLYLQMNSLRAE | ISSLEPEDFAVYYCSQSYN | | |
| | DTAVYYCLAYFDYGLAIQN | YPYTFGQGTKLEIK (SEQ | | |
| | YWGQGTLVTVSS (SEQ ID | ID NO: 350) | | |
| | NO: 349) | | | |
| Fresolimumab | QVQLVQSGAEVKKPGSSV | ETVLTQSPGTLSLSPGER | na | na |
| (Format: Whole | KVSCKASGYTFSSNVISWV | ATLSCRASQSLGSSYLAW | | |
| mAb) | RQAPGQGLEWMGGVIPI | YQQKPGQAPRLLIYGASS | | |
| | VDIANYAQRFKGRVTITAD | RAPGIPDRFSGSGSGTDF | | |
| | ESTSTTYMELSSLRSEDTA | TLTISRLEPEDFAVYYCQQ | | |
| | VYYCASTLGLVLDAMDYW | YADSPITFGQGTRLEIK | | |
| | GQGTLVTVSS (SEQ ID | (SEQ ID NO: 352) | | |
| | NO: 351) | | | |
| Frovocimab | EVQLVESGGGLVKPGGSL | DIVMTQSPLSLPVTPGEP | na | na |
| (Format: Whole | RLSCAASGFPFSKLGMVW | ASISCRSSKSLLHRNGITYS | | |
| mAb) | VRQAPGKGLEWVSTISSG | YWYLQKPGQSPQLLIYQL | | |
| | GGYTYYPDSVKGRFTISRD | SNLASGVPDRFSGSGSGT | | |
| | NAKNSLYLQMNSLRAEDT | DFTLKISRVEAEDVGVYY | | |
| | AVYYCAREGISFQGGTYTY | CYQNLELPLTFGQGTKVE | | |
| | VMDYWGQGTLVTVSS | IK (SEQ ID NO: 354) | | |
| | (SEQ ID NO: 353) | | | |
| Frunevetmab | QVQLVESGAELVQPGESL | DIEMTQSPLSLSVTPGES | na | na |
| (Format: Feline | RLTCAASGFSLTNNNVNW | VSISCRASEDIYNALAWYL | | |
| Whole mAb) | VRQAPGKGLEWMGGVW | QKPGRSPRLLIYNTDTLH | | |
| | AGGATDYNSALKSRLTITR | TGVPDRFSGSGSGTDFTL | | |
| | DTSKNTVFLQMHSLQSED | KISRVQTEDVGVYFCQHY | | |
| | TATYYCARDGGYSSSTLYA | FHYPRTFGQGTKLELK | | |
| | MDAWGQGTTVTVSA | (SEQ ID NO: 356) | | |
| | (SEQ ID NO: 355) | | | |
| Fulranumab | EVQLVESGGGLVQPGGSL | AIQLTQSPSSLSASVGDR | na | na |
| (Format: Whole | RLSCAASGFTLRSYSMNW | VTITCRASQGISSALAWY | | |
| mAb) | VRQAPGKGLEWVSYISRSS | QQKPGKAPKLLIYDASSL | | |
| | HTIFYADSVKGRFTISRDN | ESGVPSRFSGSGSGTDFT | | |
| | AKNSLYLQMDSLRDEDTA | LTISSLQPEDFATYYCQQF | | |
| | MYYCARVYSSGWHVSDY | NSYPLTFGGGTKVEIK | | |
| | FDYWGQGILVTVSS (SEQ | (SEQ ID NO: 358) | | |
| | ID NO: 357) | | | |
| Futuximab | EVQLQQPGSELVRPGASV | DIQMTQTTSSLSASLGDR | na | na |
| (Zatuximab) | KLSCKASGYTFTSYWMH | VTISCRTSQDIGNYLNWY | | |
| (Format: Whole | WVKQRPGQGLEWIGNIY | QQKPDGTVKLLIYYTSRL | | |
| mAb) | PGSRSTNYDEKFKSKATLT | HSGVPSRFSGSGSGTDFS | | |
| | VDTSSSTAYMQLSSLTSED | LTINNVEQEDVATYFCQH | | |
| | SAVYYCTRNGDYYVSSGD | YNTVPPTFGGGTKLEIK | | |
| | AMDYWGQGTSVTVSS | (SEQ ID NO: 360) | | |
| | (SEQ ID NO: 359) | | | |
| Galcanezumab | QVQLVQSGAEVKKPGSSV | DIQMTQSPSSLSASVGD | na | na |
| (Format: Whole | KVSCKASGYTFGNYWMQ | RVTITCRASKDISKYLNW | | |
| mAb) | WVRQAPGQGLEWMGAI | YQQKPGKAPKLLIYYTSG | | |
| | YEGTGKTVYIQKFADRVTI | YHSGVPSRFSGSGSGTDF | | |
| | TADKSTSTAYMELSSLRSE | TLTISSLQPEDFATYYCQQ | | |
| | DTAVYYCARLSDYVSGFGY | GDALPPTFGGGTKVEIK | | |
| | WGQGTTVTVSS (SEQ ID | (SEQ ID NO: 362) | | |
| | NO: 361) | | | |
| Gallximab | QVQLQESGPGLVKPSETLS | ESALTQPPSVSGAPGQK | na | na |
| (Format: Whole | LTCAVSGGSISGGYGWG | VTISCTGSTSNIGGYDLH | | |
| mAb) | WIRQPPGKGLEWIGSFYS | WYQQLPGTAPKLLIYDIN | | |
| | SSGNTYYNPSLKSQVTIST | KRPSGISDRFSGSKSGTA | | |
| | DTSKNQFSLKLNSMTAAD | ASLAITGLQTEDEADYYC | | |
| | TAVYYCVRDRLFSVVGMV | QSYDSSLNAQVFGGGTR | | |
| | YNNWFDVWGPGVLVTVS | LTVL (SEQ ID NO: 364) | | |
| | S (SEQ ID NO: 363) | | | |
| Gancotamab | QVQLVESGGGLVQPGGSL | QSVLTQPPSVSGAPGQR | na | na |
| (Format: scFv) | RLSCAASGFTFRSYAMSW | VTISCTGSSSNIGAGYGV | | |
| | VRQAPGKGLEWVSAISGR | HWYQQLPGTAPKLLIYG | | |
| | GDNTYYADSVKGRFTISRD | NTNRPSGVPDRFSGFKS | | |
| | NSKNTLYLQMNSLRAEDT | GTSASLAITGLQAEDEAD | | |
| | AVYYCAKMTSNAFAFDY | YYCQSYDSSLSGWVFGG | | |
| | WGQGTLVTVSS (SEQ ID | GTKLTVL (SEQ ID NO: | | |
| | NO: 365) | 366) | | |
| Ganitumab | QVQLQESGPGLVKPSGTL | DVVMTQSPLSLPVTPGE | na | na |
| (Format: Whole | SLTCAVSGGSISSSNWWS | PASISCRSSQSLLHSNGY | | |
| mAb) | WVRQPPGKGLEWIGEIYH | NYLDWYLQKPGQSPQLL | | |
| | SGSTNYNPSLKSRVTISVD | IYLGSNRASGVPDRFSGS | | |
| | KSKNQFSLKLSSVTAADTA | GSGTDFTLKISRVEAEDV | | |
| | VYYCARWTGRTDAFDIW | GVYYCMQGTHWPLTFG | | |
| | GQGTMVTVSS (SEQ ID | QGTKVEIK (SEQ ID NO: | | |
| | NO: 367) | 368) | | |
| Gantenerumab | QVELVESGGGLVQPGGSL | DIVLTQSPATLSLSPGERA | na | na |
| (Format: Whole | RLSCAASGFTFSSYAMSW | TLSCRASQSVSSSYLAWY | | |
| mAb) | VRQAPGKGLEWVSAINAS | QQKPGQAPRLLIYGASSR | | |
| | GTRTYYADSVKGRFTISRD | ATGVPARFSGSGSGTDFT | | |
| | NSKNTLYLQMNSLRAEDT | LTISSLEPEDFATYYCLQIY | | |
| | AVYYCARGKGNTHKPYGY | NMPITFGQGTKVEIK | | |
| | VRYFDVWGQGTLVTVSS | (SEQ ID NO: 370) | | |
| | (SEQ ID NO: 369) | | | |
| Garadacimab | EVQLLESGGGLVQPGGSL | QSVLTQPPSASGTPGQR | na | na |
| (Format: Whole | RLSCAASGFTFSKYIMQW | VTISCSGSSSNIGRNYVY | | |
| mAb) | VRQAPGKGLEWVSGIDIP | WYQQLPGTAPKLLIYSN | | |
| | TKGTVYADSVKGRFTISRD | NQRPSGVPDRFSGSKSG | | |
| | NSKNTLYLQMNSLRAEDT | TSASLAISGLRSEDEADYY | | |
| | AVYYCARALPRSGYLISPH | CAAWDASLRGVFGGGT | | |
| | YYYYALDVWGQGTTVTVS | KLTVL (SEQ ID NO: 372) | | |
| | S (SEQ ID NO: 371) | | | |
| Garetosmab | QVQLQESGPGLVKPSETLS | EIVLTQSPGTLSLSPGERA | na | na |
| (Format: Whole | LTCTVSGGSFSSHFWSWI | TLSCRASQSVSSSYLAWY | | |
| mAb) | RQPPGKGLEWIGYILYTGG | QQKPGQAPRLLIYGASSR | | |
| | TSFNPSLKSRVSMSVGTSK | ATGIPDRFSGSGSGTDFT | | |
| | NQFSLKLSSVTAADTAVYY | LTISRLEPEDFAVYYCQQY | | |
| | CARARSGITFTGIIVPGSFD | GSSPWTFGQGTKVEIK | | |
| | IWGQGTMVTVSS (SEQ | (SEQ ID NO: 374) | | |
| | ID NO: 373) | | | |
| Gatipotuzumab | EVQLVESGGGLVQPGGS | DIVMTQSPLSNPVTPGEP | na | na |
| (Format: Whole | MRLSCVASGFPFSNYWM | ASISCRSSKSLLHSNGITYF | | |
| mAb) | NWVRQAPGKGLEWVGEI | FWYLQKPGQSPQLLIYQ | | |
| | RLKSNNYTTHYAESVKGRF | MSNLASGVPDRFSGSGS | | |
| | TISRDDSKNSLYLQMNSLK | GTDFTLRISRVEAEDVGV | | |
| | TEDTAVYYCTRHYYFDYW | YYCAQNLELPPTFGQGTK | | |
| | GQGTLVTVSS (SEQ ID | VEIK (SEQ ID NO: 376) | | |
| | NO: 375) | | | |
| Gedivumab | EVQLVESGGGVVQPGKSL | EIVLTQSPATLSVSPGERA | na | na |
| (Format: Whole | RLSCAASGLTFSSYAVHW | TLSCRASQVISHNLAWY | | |
| mAb) | VRQAPGKGLEWVTLISYD | QQKPGQAPRLLIYGASTR | | |
| | GANQYYADSVKGRFTISR | ASGIPARFSGSGSGTDYT | | |
| | DNSKNTVYLQMNSLRPED | LTITSLQSEDFAVYYCQHY | | |
| | TAVYYCAVPGPVFGIFPP | SNWPPRLTFGGGTKVEIK | | |
| | WSYFDNWGQGILVTVSS | (SEQ ID NO: 378) | | |
| | (SEQ ID NO: 377) | | | |
| Gemtuzumab | EVQLVQSGAEVKKPGSSV | DIQLTQSPSTLSASVGDR | na | na |
| (Format: Whole | KVSCKASGYTITDSNIHWV | VTITCRASESLDNYGIRFL | | |
| mAb ADC) | RQAPGQSLEWIGYIYPYN | TWFQQKPGKAPKLLMY | | |
| | GGTDYNQKFKNRATLTVD | AASNQGSGVPSRFSGSG | | |
| | NPTNTAYMELSSLRSEDTA | SGTEFTLTISSLQPDDFAT | | |
| | FYYCVNGNPWLAYWGQ | YYCQQTKEVPWSFGQGT | | |
| | GTLVTVSS (SEQ ID NO: | KVEVK (SEQ ID NO: | | |
| | 379) | 380) | | |
| Gevokizumab | QVQLQESGPGLVKPSQTL | DIQMTQSTSSLSASVGDR | na | na |
| (Format: Whole | SLTCSFSGFSLSTSGMGVG | VTITCRASQDISNYLSWY | | |
| mAb) | WIRQPSGKGLEWLAHIW | QQKPGKAVKLLIYYTSKL | | |
| | WDGDESYNPSLKSRLTISK | HSGVPSRFSGSGSGTDYT | | |
| | DTSKNQVSLKITSVTAADT | LTISSLQQEDFATYFCLQG | | |
| | AVYFCARNRYDPPWFVD | KMLPWTFGQGTKLEIK | | |
| | WGQGTLVTVSS (SEQ ID | (SEQ ID NO: 382) | | |
| | NO: 381) | | | |
| Gilvetmab | EVQLVQSGGDLVKPGGSV | DIVMTQTPLSLSVSLGEP | na | na |
| (Format: Canine | RLSCVASGFNIKNTYMHW | ASISCHASQNINVWLSW | | |
| Whole mAb) | VRQAPGKGLQWIGRIAPA | YRQKPGQIPQLLIYKASHL | | |
| | NVDTKYAPKFQGKATISA | HTGVPDRFSGSGSGTDF | | |
| | DTAKNTAYMQLNSLRAED | TLRISRVEADDAGVYYCQ | | |
| | TAVYYCVLIYYDYDGDIDV | QGQSWPLTFGQGTKVEI | | |
| | WGQGTLVTVSS (SEQ ID | K (SEQ ID NO: 384) | | |
| | NO: 383) | | | |
| Gimsilumab | EVQLVESGGGLVQPGGSL | EIVLTQSPVTLSVSPGERV | na | na |
| (Format: Whole | RLSCAASGFTFSRHWMH | TLSCRASQSVSTNLAWY | | |
| mAb) | WLRQVPGKGPVWVSRIN | QQKLGQGPRLLIYGASTR | | |
| | GAGTSITYADSVRGRFTISR | ATDIPARFSGSGSETEFTL | | |
| | DNANNTLFLQMNSLRAD | TISSLQSEDFAVYYCQQY | | |
| | DTALYFCARANSVWFRGL | DKWPDTFGQGTKLEIK | | |
| | FDYWGQGTPVTVSS (SEQ | (SEQ ID NO: 386) | | |
| | ID NO: 385) | | | |
| Girentuximab | DVKLVESGGGLVKLGGSLK | DIVMTQSQRFMSTTVGD | na | na |
| (Format: Whole | LSCAASGFTFSNYYMSWV | RVSITCKASQNVVSAVA | | |
| mAb | RQTPEKRLELVAAINSDGG | WYQQKPGQSPKLLIYSAS | | |
| Radiolabelled) | ITYYLDTVKGRFTISRDNAK | NRYTGVPDRFTGSGSGT | | |
| | NTLYLQMSSLKSEDTALFY | DFTLTISNMQSEDLADFF | | |
| | CARHRSGYFSMDYWGQG | CQQYSNYPWTFGGGTKL | | |
| | TSVTVSS (SEQ ID NO: | EIK (SEQ ID NO: 388) | | |
| | 387) | | | |
| Glembatumumab | QVQLQESGPGLVKPSQTL | EIVMTQSPATLSVSPGER | na | na |
| (Format: | SLTCTVSGGSISSFNYYWS | ATLSCRASQSVDNNLVW | | |
| Whole mAb ADC) | WIRHHPGKGLEWIGYIYYS | YQQKPGQAPRLLIYGAST | | |
| | GSTYSNPSLKSRVTISVDTS | RATGIPARFSGSGSGTEF | | |
| | KNQFSLTLSSVTAADTAVY | TLTISSLQSEDFAVYYCQQ | | |
| | YCARGYNWNYFDYWGQ | YNNWPPWTFGQGTKVE | | |
| | GTLVTVSS (SEQ ID NO: | IK (SEQ ID NO: 390) | | |
| | 389) | | | |
| Glenzocimab | QVQLVQSGAEVKKPGASV | DIQMTQSPSSLSASVGD | na | na |
| (Format: Fab) | KVSCKASGYTFTSYNMHW | RVTITCRSSQSLENSNGN | | |
| | VRQAPGQGLEWMGGIYP | TYLNWYQQKPGKAPKLLI | | |
| | GNGDTSYNQKFQGRVTM | YRVSNRFSGVPSRFSGSG | | |
| | TRDTSTSTVYMELSSLRSE | SGRDFTFTISSLQPEDIAT | | |
| | DTAVYYCARGTVVGDWY | YYCLQLTHVPWTFGQGT | | |
| | FDVWGQGTLVTVSS (SEQ | KVEIT (SEQ ID NO: 392) | | |
| | ID NO: 391) | | | |
| Golimumab | QVQLVESGGGVVQPGRSL | EIVLTQSPATLSLSPGERA | na | na |
| (Format: Whole | RLSCAASGFIFSSYAMHW | TLSCRASQSVYSYLAWYQ | | |
| mAb) | VRQAPGNGLEWVAFMSY | QKPGQAPRLLIYDASNRA | | |
| | DGSNKKYADSVKGRFTISR | TGIPARFSGSGSGTDFTLT | | |
| | DNSKNTLYLQMNSLRAED | ISSLEPEDFAVYYCQQRS | | |
| | TAVYYCARDRGIAAGGNY | NWPPFTFGPGTKVDIK | | |
| | YYYGMDVWGQGTTVTVS | (SEQ ID NO: 394) | | |
| | S (SEQ ID NO: 393) | | | |
| Gosuranemab | EVHLVESGGALVKPGGSLR | DVVMTQSPLSLPVTLGQ | na | na |
| (Format: Whole | LSCAASGFSFSKYGMSWV | PASISCKSSQSIVHSNGNT | | |
| mAb) | RQAPGKGLEWVATISSSG | YLEWYLQKPGQSPQLLV | | |
| | SRTYYPDSVKGRFTISRDN | YKVSNRFSGVPDRFSGSG | | |
| | AKNTLYLQMNSLRAEDTA | SGTDFTLKISRVEAEDVG | | |
| | MYYCSISWDGAMDYWG | TYYCFQGSLVPWAFGGG | | |
| | QGTTVTVSS (SEQ ID NO: | TKVEIK (SEQ ID NO: | | |
| | 395) | 396) | | |
| Guselkumab | EVQLVQSGAEVKKPGESL | QSVLTQPPSVSGAPGQR | na | na |
| (Format: Whole | KISCKGSGYSFSNYWIGW | VTISCTGSSSNIGSGYDVH | | |
| mAb) | VRQMPGKGLEWMGIIDP | WYQQLPGTAPKLLIYGNS | | |
| | SNSYTRYSPSFQGQVTISA | KRPSGVPDRFSGSKSGTS | | |
| | DKSISTAYLQWSSLKASDT | ASLAITGLQSEDEADYYC | | |
| | AMYYCARWYYKPFDVWG | ASWTDGLSLVVFGGGTK | | |
| | QGTLVTVSS (SEQ ID NO: | LTVL (SEQ ID NO: 398) | | |
| | 397) | | | |
| Ianalumab | QVQLQQSGPGLVKPSQTL | DIVLTQSPATLSLSPGERA | na | na |
| (Format: Whole | SLTCAISGDSVSSNSAAWG | TLSCRASQFILPEYLSWYQ | | |
| mAb) | WIRQSPGRGLEWLGRIYY | QKPGQAPRLLIYGSSSRA | | |
| | RSKWYNSYAVSVKSRITIN | TGVPARFSGSGSGTDFTL | | |
| | PDTSKNQFSLQLNSVTPED | TISSLEPEDFAVYYCQQFY | | |
| | TAVYYCARYQWVPKIGVF | SSPLTFGQGTKVEIK | | |
| | DSWGQGTLVTVSS (SEQ | (SEQ ID NO: 400) | | |
| | ID NO: 399) | | | |
| Ibalizumab | QVQLQQSGPEVVKPGAS | DIVMTQSPDSLAVSLGER | na | na |
| (Format: Whole | VKMSCKASGYTFTSYVIH | VTMNCKSSQSLLYSTNQ | | |
| mAb) | WVRQKPGQGLDWIGYIN | KNYLAWYQQKPGQSPKL | | |
| | PYNDGTDYDEKFKGKATL | LIYWASTRESGVPDRFSG | | |
| | TSDTSTSTAYMELSSLRSE | SGSGTDFTLTISSVQAED | | |
| | DTAVYYCAREKDNYATGA | VAVYYCQQYYSYRTFGG | | |
| | WFAYWGQGTLVTVSS | GTKLEIK (SEQ ID NO: | | |
| | (SEQ ID NO: 401) | 402) | | |
| Icrucumab | QAQVVESGGGVVQSGRS | EIVLTQSPGTLSLSPGERA | na | na |
| (Format: Whole | LRLSCAASGFAFSSYGMH | TLSCRASQSVSSSYLAWY | | |
| mAb) | WVRQAPGKGLEWVAVI | QQKPGQAPRLLIYGASSR | | |
| | WYDGSNKYYADSVRGRFT | ATGIPDRFSGSGSGTDFT | | |
| | ISRDNSENTLYLQMNSLRA | LTISRLEPEDFAVYYCQQY | | |
| | EDTAVYYCARDHYGSGVH | GSSPLTFGGGTKVEIK | | |
| | HYFYYGLDVWGQGTTVT | (SEQ ID NO: 404) | | |
| | VSS (SEQ ID NO: 403) | | | |
| Idarucizumab | QVQLQESGPGLVKPSETLS | DVVMTQSPLSLPVTLGQ | na | na |
| (Format: Fab) | LTCTVSGFSLTSYIVDWIRQ | PASISCKSSQSLLYTDGKT | | |
| | PPGKGLEWIGVIWAGGST | YLYWFLQRPGQSPRRLIY | | |
| | GYNSALRSRVSITKDTSKN | LVSKLDSGVPDRFSGSGS | | |
| | QFSLKLSSVTAADTAVYYC | GTDFTLKISRVEAEDVGV | | |
| | ASAAYYSYYNYDGFAYWG | YYCLQSTHFPHTFGGGTK | | |
| | QGTLVTVSS (SEQ ID NO: | VEIK (SEQ ID NO: 406) | | |
| | 405) | | | |
| leramilimab | QVQLVQSGAEVKKPGASV | DIQMTQSPSSLSASVGD | na | na |
| (Format: Whole | KVSCKASGFTLTNYGMN | RVTITCSSSQDISNYLNW | | |
| mAb) | WVRQARGQRLEWIGWIN | YLQKPGQSPQLLIYYTSTL | | |
| | TDTGEPTYADDFKGRFVFS | HLGVPSRFSGSGSGTEFT | | |
| | LDTSVSTAYLQISSLKAEDT | LTISSLQPDDFATYYCQQ | | |
| | AVYYCARNPPYYYGTNNA | YYNLPWTFGQGTKVEIK | | |
| | EAMDYWGQGTTVTVSS | (SEQ ID NO: 408) | | |
| | (SEQ ID NO: 407) | | | |
| Ifabotuzumab | QVQLVQSGAEVKKPGASV | DIQMTQSPSFLSASVGD | na | na |
| (Format: Whole | KVSCKASGYTFTGYWMN | RVTITCRASQGIISYLAWY | | |
| mAb) | WVRQAPGQGLEWMGDI | QQKPEKAPKRLIYAASSL | | |
| | YPGSGNTNYDEKFQGRVT | QSGVPSRFSGSGSGTEFT | | |
| | MTRDTSISTAYMELSRLRS | LTISSLQPEDFATYYCGQY | | |
| | DDTAVYYCARGGYYEDFD | ANYPYTFGQGTKLEIK | | |
| | SWGQGTTVTVSS (SEQ ID | (SEQ ID NO: 410) | | |
| | NO: 409) | | | |
| lladatuzumab | EVQLVESGGGLVQPGGSL | DIQLTQSPSSLSASVGDR | na | na |
| (Format: Whole | RLSCAASGYTFSSYWIEWV | VTITCKASQSVDYEGDSF | | |
| mAb ADC) | RQAPGKGLEWIGEILPGG | LNWYQQKPGKAPKLLIY | | |
| | GDTNYNEIFKGRATFSADT | AASNLESGVPSRFSGSGS | | |
| | SKNTAYLQMNSLRAEDTA | GTDFTLTISSLQPEDFATY | | |
| | VYYCTRRVPIRLDYWGQG | YCQQSNEDPLTFGQGTK | | |
| | TLVTVSS (SEQ ID NO: | VEIK (SEQ ID NO: 412) | | |
| | 411) | | | |
| Imalumab | EVQLLESGGGLVQPGGSL | DIQMTQSPSSLSASVGD | na | na |
| (Format: Whole | RLSCAASGFTFSIYSMNW | RVTITCRSSQRIMTYLNW | | |
| mAb) | VRQAPGKGLEWVSSIGSS | YQQKPGKAPKLLIFVASH | | |
| | GGTTYYADSVKGRFTISRD | SQSGVPSRFRGSGSETDF | | |
| | NSKNTLYLQMNSLRAEDT | TLTISGLQPEDSATYYCQ | | |
| | AVYYCAGSQWLYGMDV | QSFWTPLTFGGGTKVEIK | | |
| | WGQGTTVTVSS (SEQ ID | (SEQ ID NO: 414) | | |
| | NO: 413) | | | |
| Imaprelimab | QVTLKESGPVLVKPTETLTL | DIQMTQSPSSLSASVGD | na | na |
| (Format: Whole | TCTVSGFSLTSNAVSWVR | RVTINCKASQNIYNSLAW | | |
| mAb) | QPPGKALEWIAAISSGGTT | YQQKPGKAPKVLIFNANS | | |
| | YYNSAFKSRLTISRDTSKSQ | LQTGIPSRFSGSGSGTDF | | |
| | VVLTMTNMDPVDTATYY | TLTISSLQPEDFATYYCQQ | | |
| | CARRYGYGWYFDFWGQG | FYSGYTFGQGTKLEIK | | |
| | TLVTVSS (SEQ ID NO: | (SEQ ID NO: 416) | | |
| | 415) | | | |
| Imgatuzumab | QVQLVQSGAEVKKPGSSV | DIQMTQSPSSLSASVGD | na | na |
| (Format: Whole | KVSCKASGFTFTDYKIHWV | RVTITCRASQGINNYLN | | |
| mAb) | RQAPGQGLEWMGYFNP | WYQQKPGKAPKRLIYNT | | |
| | NSGYSTYAQKFQGRVTITA | NNLQTGVPSRFSGSGSG | | |
| | DKSTSTAYMELSSLRSEDT | TEFTLTISSLQPEDFATYY | | |
| | AVYYCARLSPGGYYVMDA | CLQHNSFPTFGQGTKLEI | | |
| | WGQGTTVTVSS (SEQ ID | K (SEQ ID NO: 418) | | |
| | NO: 417) | | | |
| Inclacumab | EVQLVESGGGLVRPGGSL | EIVLTQSPATLSLSPGERA | na | na |
| (Format: Whole | RLSCAASGFTFSNYDMH | TLSCRASQSVSSYLAWYQ | | |
| mAb) | WVRQATGKGLEWVSAIT | QKPGQAPRLLIYDASNRA | | |
| | AAGDIYYPGSVKGRFTISR | TGIPARFSGSGSGTDFTLT | | |
| | ENAKNSLYLQMNSLRAGD | ISSLEPEDFAVYYCQQRS | | |
| | TAVYYCARGRYSGSGSYY | NWPLTFGGGTKVEIK | | |
| | NDWFDPWGQGTLVTVSS | (SEQ ID NO: 420) | | |
| | (SEQ ID NO: 419) | | | |
| Indatuximab | QVQLQQSGSELMMPGAS | DIQMTQSTSSLSASLGDR | na | na |
| (Format: Whole | VKISCKATGYTFSNYWIEW | VTISCSASQGINNYLNWY | | |
| mAb ADC) | VKQRPGHGLEWIGEILPG | QQKPDGTVELLIYYTSTL | | |
| | TGRTIYNEKFKGKATFTADI | QSGVPSRFSGSGSGTDYS | | |
| | SSNTVQMQLSSLTSEDSA | LTISNLEPEDIGTYYCQQY | | |
| | VYYCARRDYYGNFYYAMD | SKLPRTFGGGTKLEIK | | |
| | YWGQGTSVTVSS (SEQ ID | (SEQ ID NO: 422) | | |
| | NO: 421) | | | |
| Indusatumab | QVQLQQWGAGLLKPSETL | EIVMTQSPATLSVSPGER | na | na |
| (Format: Whole | SLTCAVFGGSFSGYYWSW | ATLSCRASQSVSRNLAW | | |
| mAb ADC) | IRQPPGKGLEWIGEINHRG | YQQKPGQAPRLLIYGAST | | |
| | NTNDNPSLKSRVTISVDTS | RATGIPARFSGSGSGTEF | | |
| | KNQFALKLSSVTAADTAVY | TLTIGSLQSEDFAVYYCQ | | |
| | YCARERGYTYGNFDHWG | QYKTWPRTFGQGTNVEI | | |
| | QGTLVTVSS (SEQ ID NO: | K (SEQ ID NO: 424) | | |
| | 423) | | | |
| Inebilizumab | EVQLVESGGGLVQPGGSL | EIVLTQSPDFQSVTPKEK | na | na |
| (Format: Whole | RLSCAASGFTFSSSWMN | VTITCRASESVDTFGISFM | | |
| mAb) | WVRQAPGKGLEWVGRIY | NWFQQKPDQSPKLLIHE | | |
| | PGDGDTNYNVKFKGRFTI | ASNQGSGVPSRFSGSGS | | |
| | SRDDSKNSLYLQMNSLKT | GTDFTLTINSLEAEDAATY | | |
| | EDTAVYYCARSGFITTVRD | YCQQSKEVPFTFGGGTK | | |
| | FDYWGQGTLVTVSS (SEQ | VEIK (SEQ ID NO: 426) | | |
| | ID NO: 425) | | | |
| Infliximab | EVKLEESGGGLVQPGGSM | DILLTQSPAILSVSPGERV | na | na |
| (Format: Whole | KLSCVASGFIFSNHWMN | SFSCRASQFVGSSIHWYQ | | |
| mAb) | WVRQSPEKGLEWVAEIRS | QRTNGSPRLLIKYASESM | | |
| | KSINSATHYAESVKGRFTIS | SGIPSRFSGSGSGTDFTLS | | |
| | RDDSKSAVYLQMTDLRTE | INTVESEDIADYYCQQSH | | |
| | DTGVYYCSRNYYGSTYDY | SWPFTFGSGTNLEVK | | |
| | WGQGTTLTVSS (SEQ ID | (SEQ ID NO: 428) | | |
| | NO: 427) | | | |
| Inotuzumab | EVQLVQSGAEVKKPGASV | DVQVTQSPSSLSASVGD | na | na |
| (Format: Whole | KVSCKASGYRFTNYWIHW | RVTITCRSSQSLANSYGN | | |
| mAb ADC) | VRQAPGQGLEWIGGINPG | TFLSWYLHKPGKAPQLLI | | |
| | NNYATYRRKFQGRVTMT | YGISNRFSGVPDRFSGSG | | |
| | ADTSTSTVYMELSSLRSED | SGTDFTLTISSLQPEDFAT | | |
| | TAVYYCTREGYGNYGAWF | YYCLQGTHQPYTFGQGT | | |
| | AYWGQGTLVTVSS (SEQ | KVEIK (SEQ ID NO: 430) | | |
| | ID NO: 429) | | | |
| Intetumumab | QVQLVESGGGVVQPGRS | EIVLTQSPATLSLSPGERA | na | na |
| (Format: Whole | RRLSCAASGFTFSRYTMH | TLSCRASQSVSSYLAWYQ | | |
| mAb) | WVRQAPGKGLEWVAVIS | QKPGQAPRLLIYDASNRA | | |
| | FDGSNKYYVDSVKGRFTIS | TGIPARFSGSGSGTDFTLT | | |
| | RDNSENTLYLQVNILRAED | ISSLEPEDFAVYYCQQRS | | |
| | TAVYYCAREARGSYAFDI | NWPPFTFGPGTKVDIK | | |
| | WGQGTMVTVSS (SEQ ID | (SEQ ID NO: 432) | | |
| | NO: 431) | | | |
| Ipilimumab | QVQLVESGGGVVQPGRSL | EIVLTQSPGTLSLSPGERA | na | na |
| (Format: Whole | RLSCAASGFTFSSYTMHW | TLSCRASQSVGSSYLAWY | | |
| mAb) | VRQAPGKGLEWVTFISYD | QQKPGQAPRLLIYGAFSR | | |
| | GNNKYYADSVKGRFTISRD | ATGIPDRFSGSGSGTDFT | | |
| | NSKNTLYLQMNSLRAEDT | LTISRLEPEDFAVYYCQQY | | |
| | AIYYCARTGWLGPFDYWG | GSSPWTFGQGTKVEIK | | |
| | QGTLVTVSS (SEQ ID NO: | (SEQ ID NO: 434) | | |
| | 433) | | | |
| Iratumumab | QVQLQQWGAGLLKPSETL | DIQMTQSPTSLSASVGD | na | na |
| (Format: Whole | SLTCAVYGGSFSAYYWSW | RVTITCRASQGISSWLTW | | |
| mAb) | IRQPPGKGLEWIGDINHG | YQQKPEKAPKSLIYAASSL | | |
| | GGTNYNPSLKSRVTISVDT | QSGVPSRFSGSGSGTDFT | | |
| | SKNQFSLKLNSVTAADTAV | LTISSLQPEDFATYYCQQY | | |
| | YYCASLTAYWGQGSLVTV | DSYPITFGQGTRLEIK | | |
| | SS (SEQ ID NO: 435) | (SEQ ID NO: 436) | | |
| Isatuximab | QVQLVQSGAEVAKPGTSV | DIVMTQSHLSMSTSLGD | na | na |
| (Format: Whole | KLSCKASGYTFTDYWMQ | PVSITCKASQDVSTVVA | | |
| mAb) | WVKQRPGQGLEWIGTIYP | WYQQKPGQSPRRLIYSA | | |
| | GDGDTGYAQKFQGKATLT | SYRYIGVPDRFTGSGAGT | | |
| | ADKSSKTVYMHLSSLASED | DFTFTISSVQAEDLAVYYC | | |
| | SAVYYCARGDYYGSNSLD | QQHYSPPYTFGGGTKLEI | | |
| | YWGQGTSVTVSS (SEQ ID | K (SEQ ID NO: 438) | | |
| | NO: 437) | | | |
| Iscalimab | QVQLVESGGGVVQPGRSL | DIVMTQSPLSLTVTPGEP | na | na |
| (Format: Whole | RLSCAASGFTFSSYGMHW | ASISCRSSQSLLYSNGYNY | | |
| mAb) | VRQAPGKGLEWVAVISYE | LDWYLQKPGQSPQVLISL | | |
| | ESNRYHADSVKGRFTISRD | GSNRASGVPDRFSGSGS | | |
| | NSKITLYLQMNSLRTEDTA | GTDFTLKISRVEAEDVGV | | |
| | VYYCARDGGIAAPGPDYW | YYCMQARQTPFTFGPGT | | |
| | GQGTLVTVSS (SEQ ID | KVDIR (SEQ ID NO: 440) | | |
| | NO: 439) | | | |
| Istiratumab | EVQLLQSGGGLVQPGGSL | DIQMTQSPSSLSASLGDR | QVQLVQSGGGLV | SYELTQDPAVSVA |
| (Format: | RLSCAASGFMFSRYPMH | VTITCRASQGISSYLAWY | QPGGSLRLSCAAS | LGQTVRITCQGDS |
| Bispecific Mixed | WVRQAPGKGLEWVGSIS | QQKPGKAPKLLIYAKSTL | GFTFDDYAMHWV | LRSYYASWYQQK |
| mAb and scFv) | GSGGATPYADSVKGRFTIS | QSGVPSRFSGSGSGTDFT | RQAPGKGLEWVA | PGQAPVLVIYGKN |
| | RDNSKNTLYLQMNSLRAE | LTISSLQPEDSATYYCQQY | GISWDSGSTGYAD | NRPSGIPDRFSGS |
| | DTAVYYCAKDFYQILTGNA | WTFPLTFGGGTKVEIK | SVKGRFTISRDNAK | TSGNSASLTITGA |
| | FDYWGQGTTVTVSS (SEQ | (SEQ ID NO: 442) | NSLYLQMNSLRAE | QAEDEADYYCNS |
| | ID NO: 441) | | DTALYYCARDLGAY | RDSPGNQWVFG |
| | | | QWVEGFDYWGQ | GGTKVTVL (SEQ |
| | | | GTLVTVSS | ID NO: 444) |
| | | | (SEQ ID NO: 443) | |
| Itolizumab | EVQLVESGGGLVKPGGSL | DIQMTQSPSSLSASVGD | na | na |
| (Format: Whole | KLSCAASGFKFSRYAMSW | RVTITCKASRDIRSYLTWY | | |
| mAb) | VRQAPGKRLEWVATISSG | QQKPGKAPKTLIYYATSL | | |
| | GSYIYYPDSVKGRFTISRDN | ADGVPSRFSGSGSGQDY | | |
| | VKNTLYLQMSSLRSEDTA | SLTISSLESDDTATYYCLQ | | |
| | MYYCARRDYDLDYFDSW | HGESPFTLGSGTKLEIK | | |
| | GQGTLVTVSS (SEQ ID | (SEQ ID NO: 446) | | |
| | NO: 445) | | | |
| Ixekizumab | QVQLVQSGAEVKKPGSSV | DIVMTQTPLSLSVTPGQP | na | na |
| (Format: Whole | KVSCKASGYSFTDYHIHW | ASISCRSSRSLVHSRGNTY | | |
| mAb) | VRQAPGQGLEWMGVINP | LHWYLQKPGQSPQLLIYK | | |
| | MYGTTDYNQRFKGRVTIT | VSNRFIGVPDRFSGSGSG | | |
| | ADESTSTAYMELSSLRSED | TDFTLKISRVEAEDVGVY | | |
| | TAVYYCARYDYFTGTGVY | YCSQSTHLPFTFGQGTKL | | |
| | WGQGTLVTVSS (SEQ ID | EIK (SEQ ID NO: 448) | | |
| | NO: 447) | | | |
| Labetuzumab | EVQLVESGGGVVQPGRSL | DIQLTQSPSSLSASVGDR | na | na |
| (Format: Whole | RLSCSASGFDFTTYWMS | VTITCKASQDVGTSVAW | | |
| mAb ADC) | WVRQAPGKGLEWIGEIHP | YQQKPGKAPKLLIYWTST | | |
| | DSSTINYAPSLKDRFTISRD | RHTGVPSRFSGSGSGTDF | | |
| | NAKNTLFLQMDSLRPEDT | TFTISSLQPEDIATYYCQQ | | |
| | GVYFCASLYFGFPWFAYW | YSLYRSFGQGTKVEIK | | |
| | GQGTPVTVSS (SEQ ID | (SEQ ID NO: 450) | | |
| | NO: 449) | | | |
| Lacnotuzumab | QVQLQESGPGLVKPSQTL | DIVLTQSPAFLSVTPGEKV | na | na |
| (Format: Whole | SLTCTVSDYSITSDYAWN | TFTCQASQSIGTSIHWYQ | | |
| mAb) | WIRQFPGKGLEWMGYISY | QKTDQAPKLLIKYASESIS | | |
| | SGSTSYNPSLKSRITISRDTS | GIPSRFSGSGSGTDFTLTI | | |
| | KNQFSLQLNSVTAADTAV | SSVEAEDAADYYCQQINS | | |
| | YYCASFDYAHAMDYWGQ | WPTTFGGGTKLEIK (SEQ | | |
| | GTTVTVSS (SEQ ID NO: | ID NO: 452) | | |
| | 451) | | | |
| Lacutamab | QIQLVQSGSELKKPGASVK | DIQMTQSPSFLSASVGD | na | na |
| (Format: Whole | VSCKASGYTFTTAGMQW | RVTITCKASQDVSTAVA | | |
| mAb) | VRQAPGQGLEWIGWINS | WYQQKPGQPPKLLIYWT | | |
| | HSGVPKYAEDFKGRFVFSL | STRHTGVPDRFSGSGSGT | | |
| | DTSVSTAYLQISSLKAEDTA | DYTLTISSLQAEDVAVYYC | | |
| | VYFCARGGDEGVMDYW | QQHYSTPWTFGGGTKVE | | |
| | GQGTTVTVSS (SEQ ID | IK (SEQ ID NO: 454) | | |
| | NO: 453) | | | |
| Ladiratuzumab | QVQLVQSGAEVKKPGASV | DVVMTQSPLSLPVTLGQ | na | na |
| (Format: Whole | KVSCKASGLTIEDYYMHW | PASISCRSSQSLLHSSGNT | | |
| mAb ADC) | VRQAPGQGLEWMGWID | YLEWYQQRPGQSPRPLIY | | |
| | PENGDTEYGPKFQGRVT | KISTRFSGVPDRFSGSGS | | |
| | MTRDTSINTAYMELSRLRS | GTDFTLKISRVEAEDVGV | | |
| | DDTAVYYCAVHNAHYGT | YYCFQGSHVPYTFGGGT | | |
| | WFAYWGQGTLVTVSS | KVEIK (SEQ ID NO: 456) | | |
| | (SEQ ID NO: 455) | | | |
| Lampalizumab | EVQLVQSGPELKKPGASV | DIQVTQSPSSLSASVGDR | na | na |
| (Format: Fab) | KVSCKASGYTFTNYGMN | VTITCITSTDIDDDMNWY | | |
| | WVRQAPGQGLEWMGWI | QQKPGKVPKLLISGGNTL | | |
| | NTYTGETTYADDFKGRFVF | RPGVPSRFSGSGSGTDFT | | |
| | SLDTSVSTAYLQISSLKAED | LTISSLQPEDVATYYCLQS | | |
| | TAVYYCEREGGVNNWGQ | DSLPYTFGQGTKVEIK | | |
| | GTLVTVSS (SEQ ID NO: | (SEQ ID NO: 458) | | |
| | 457) | | | |
| Lanadelumab | EVQLLESGGGLVQPGGSL | DIQMTQSPSTLSASVGD | na | na |
| (Format: Whole | RLSCAASGFTFSHYIMMW | RVTITCRASQSISSWLAW | | |
| mAb) | VRQAPGKGLEWVSGIYSS | YQQKPGKAPKLLIYKASTL | | |
| | GGITVYADSVKGRFTISRD | ESGVPSRFSGSGSGTEFT | | |
| | NSKNTLYLQMNSLRAEDT | LTISSLQPDDFATYYCQQ | | |
| | AVYYCAYRRIGVPRRDEFD | YNTYWTFGQGTKVEIK | | |
| | IWGQGTMVTVSS (SEQ | (SEQ ID NO: 460) | | |
| | ID NO: 459) | | | |
| Landogrozumab | EVQLVESGGGLVQPGGSL | EIVLTQSPGTLSLSPGERA | na | na |
| (Format: Whole | RLSCAASGLTFSRYPMSW | TLSCRASSSVSSSYLHWY | | |
| mAb) | VRQAPGKGLVWVSAITSS | QQKPGQAPRLLIYSTSNL | | |
| | GGSTYYSDTVKGRFTISRD | VAGIPDRFSGSGSGTDFT | | |
| | NAKNTLYLQMNSLRAEDT | LTISRLEPEDFAVYYCQH | | |
| | AVYYCARLPDYWGQGTLV | HSGYHFTFGGGTKVEIK | | |
| | TVSS (SEQ ID NO: 461) | (SEQ ID NO: 462) | | |
| Laprituximab | QVQLVQSGAEVAKPGASV | DIQMTQSPSSLSASVGD | na | na |
| (Format: Whole | KLSCKASGYTFTSYWMQ | RVTITCRASQDINNYLAW | | |
| mAb ADC) | WVKQRPGQGLECIGTIYP | YQHKPGKGPKLLIHYTSTL | | |
| | GDGDTTYTQKFQGKATLT | HPGIPSRFSGSGSGRDYS | | |
| | ADKSSSTAYMQLSSLRSED | FSISSLEPEDIATYYCLQYD | | |
| | SAVYYCARYDAPGYAMDY | NLLYTFGQGTKLEIK (SEQ | | |
| | WGQGTLVTVSS (SEQ ID | ID NO: 464) | | |
| | NO: 463) | | | |
| Larcaviximab | EVQLQESGPELEMPGASV | DIQMTQSPASLSASVGET | na | na |
| (Format: Whole | KISCKASGSSFTGFSMNW | VTITCRASENIYSYLAWY | | |
| mAb) | VKQSNGKSLEWIGNIDTYY | QQKQGKSPQLLVYNAKT | | |
| | GGTTYNQKFKGKATLTVD | LIEGVPSRFSGSGSGTQFS | | |
| | KSSSTAYMQLKSLTSEDSA | LKINSLQPEDFGSYFCQH | | |
| | VYYCARSAYYGSTFAYWG | HFGTPFTFGSGTELEIK | | |
| | QGTLVTVSA (SEQ ID NO: | (SEQ ID NO: 466) | | |
| | 465) | | | |
| Lebrikizumab | QVTLRESGPALVKPTQTLT | DIVMTQSPDSLSVSLGER | na | na |
| (Format: Whole | LTCTVSGFSLSAYSVNWIR | ATINCRASKSVDSYGNSF | | |
| mAb) | QPPGKALEWLAMIWGDG | MHWYQQKPGQPPKLLIY | | |
| | KIVYNSALKSRLTISKDTSK | LASNLESGVPDRFSGSGS | | |
| | NQVVLTMTNMDPVDTAT | GTDFTLTISSLQAEDVAV | | |
| | YYCAGDGYYPYAMDNWG | YYCQQNNEDPRTFGGGT | | |
| | QGSLVTVSS (SEQ ID NO: | KVEIK (SEQ ID NO: 468) | | |
| | 467) | | | |
| Lenvervimab | EVQLVESGGGLVKPGGSL | DIVVTQSPSSLSASVGDR | na | na |
| (Format: Whole | RLSCSASGFSLTKYKMTW | VTITCRASQGIYNSIAWY | | |
| mAb) | VRQAPGKGLEWVSSISSTS | QQKPGKAPKLLLYSTSTLL | | |
| | RDIDYADSVKGRFTISRDN | SGVPSRFSGSGSGTDYTL | | |
| | AKNSLFLQMSSLRVDDTA | TITNLQPEDFATYYCQQY | | |
| | VYYCTRDGWLWGWDVR | FVTPETFGQGTKLEIK | | |
| | SNYYYNALDVWGQGTTV | (SEQ ID NO: 470) | | |
| | TVSS (SEQ ID NO: 469) | | | |
| Lenzilumab | QVQLVQSGAEVKKPGASV | EIVLTQSPATLSVSPGERA | na | na |
| (Format: Whole | KVSCKASGYSFTNYYIHWV | TLSCRASQSVGTNVAWY | | |
| mAb) | RQAPGQRLEWMGWINA | QQKPGQAPRVLIYSTSSR | | |
| | GNGNTKYSQKFQGRVTIT | ATGITDRFSGSGSGTDFT | | |
| | RDTSASTAYMELSSLRSED | LTISRLEPEDFAVYYCQQF | | |
| | TAVYYCVRRQRFPYYFDY | NKSPLTFGGGTKVEIK | | |
| | WGQGTLVTVSS (SEQ ID | (SEQ ID NO: 472) | | |
| | NO: 471) | | | |
| Leronlimab | EVQLVESGGGLVKPGGSL | DIVMTQSPLSLPVTPGEP | na | na |
| (Format: Whole | RLSCAASGYTFSNYWIGW | ASISCRSSQRLLSSYGHTY | | |
| mAb) | VRQAPGKGLEWIGDIYPG | LHWYLQKPGQSPQLLIYE | | |
| | GNYIRNNEKFKDKTTLSAD | VSNRFSGVPDRFSGSGS | | |
| | TSKNTAYLQMNSLKTEDT | GTDFTLKISRVEAEDVGV | | |
| | AVYYCGSSFGSNYVFAWF | YYCSQSTHVPLTFGQGTK | | |
| | TYWGQGTLVTVSS (SEQ | VEIK (SEQ ID NO: 474) | | |
| | ID NO: 473) | | | |
| Lesofavumab | EVQLVQSGAEVKKPGESL | DIVMTQSPLSLPVTPGEP | na | na |
| (Format: Whole | KISCKVSGYSFTSQWIGW | ASISCRSSQSLLRSNGYNY | | |
| mAb) | VRQMPGKGLEWIGMMY | LDWYLQKPGQSPQLLIYL | | |
| | PGESETIYSPSFQGQVTISA | GSNRASGVPDRFSGSGS | | |
| | DNSISTAYLQWSSLKASDT | GTDFTLKISRVEAEDVGV | | |
| | AIYYCASGPGYSGYHYGW | YYCMQALQTPYTFGQGT | | |
| | FDTWGQGTLVTVSS | KLEIK | | |
| | (SEQ ID NO: 475) | (SEQ ID NO: 476) | | |
| Letolizumab | EVQLLESGGGLVQPGGSL | na | na | na |
| (Format: Single | RLSCAASGFTFNWELMG | | | |
| Domain Variable | WARQAPGKGLEWVSGIE | | | |
| Fragment; H) | GPGDVTYYADSVKGRFTIS | | | |
| | RDNSKNTLYLQMNSLRAE | | | |
| | DTAVYYCVKVGKDAKSDY | | | |
| | RGQGTLVTVSS (SEQ ID | | | |
| | NO: 477) | | | |
| Levilimab | QVQLVQSGGGLVQPGGS | DIQLTQSPSSVSVSVGER | na | na |
| (Format: Whole | LRLSCAASGFTFSSYYMSW | VTIDCKSSQSVLSASNTYL | | |
| mAb) | VRQAPGKGLEWVSGIYSD | NWYQQKPGQAPQLLIYY | | |
| | GTTHYGDSVKGRFTISRDN | ASTRESGVPDRFSGSGSG | | |
| | AKNTVYLQLNSLRAEDTA | TDFTLTISSLQAEDAAVYY | | |
| | MYYCAKGAGPTWWYAL | CQQAYRAPVTFGQGTKL | | |
| | DAWGQGTLVTVSS (SEQ | EIK (SEQ ID NO: 479) | | |
| | ID NO: 478) | | | |
| Lexatumumab | EVQLVQSGGGVERPGGSL | SSELTQDPAVSVALGQTV | na | na |
| (Format: Whole | RLSCAASGFTFDDYGMSW | RITCQGDSLRSYYASWYQ | | |
| mAb) | VRQAPGKGLEWVSGINW | QKPGQAPVLVIYGKNNR | | |
| | NGGSTGYADSVKGRVTIS | PSGIPDRFSGSSSGNTASL | | |
| | RDNAKNSLYLQMNSLRAE | TITGAQAEDEADYYCNSR | | |
| | DTAVYYCAKILGAGRGWY | DSSGNHVVFGGGTKLTV | | |
| | FDLWGKGTTVTVSS (SEQ | L (SEQ ID NO: 481) | | |
| | ID NO: 480) | | | |
| Lifastuzumab | EVQLVESGGGLVQPGGSL | DIQMTQSPSSLSASVGD | na | na |
| (Format: Whole | RLSCAASGFSFSDFAMSW | RVTITCRSSETLVHSSGNT | | |
| mAb ADC) | VRQAPGKGLEWVATIGRV | YLEWYQQKPGKAPKLLIY | | |
| | AFHTYYPDSMKGRFTISRD | RVSNRFSGVPSRFSGSGS | | |
| | NSKNTLYLQMNSLRAEDT | GTDFTLTISSLQPEDFATY | | |
| | AVYYCARHRGFDVGHFDF | YCFQGSFNPLTFGQGTK | | |
| | WGQGTLVTVSS (SEQ ID | VEIK (SEQ ID NO: 483) | | |
| | NO: 482) | | | |
| Ligelizumab | QVQLVQSGAEVMKPGSS | EIVMTQSPATLSVSPGER | na | na |
| (Format: Whole | VKVSCKASGYTFSWYWLE | ATLSCRASQSIGTNIHWY | | |
| mAb) | WVRQAPGHGLEWMGEI | QQKPGQAPRLLIYYASESI | | |
| | DPGTFTTNYNEKFKARVTF | SGIPARFSGSGSGTEFTLT | | |
| | TADTSTSTAYMELSSLRSE | ISSLQSEDFAVYYCQQSW | | |
| | DTAVYYCARFSHFSGSNY | SWPTTFGGGTKVEIK | | |
| | DYFDYWGQGTLVTVSS | (SEQ ID NO: 485) | | |
| | (SEQ ID NO: 484) | | | |
| Lilotomab | EIQLQQSGPELVKPGASVK | DIVMTQSHKLLSTSVGDR | na | na |
| (Format: Whole | VSCKASGYSFTDYNMYW | VSITCKASQDVSTAVDW | | |
| mAb ADC) | VKQSHGKSLEWIGYIDPYN | YQQKPGQSPKLLINWAS | | |
| | GDTTYNQKFKGKATLTVD | TRHTGVPDRFTGSGSGT | | |
| | KSSSTAFIHLNSLTSEDSAV | DYTLTISSMQAEDLALYY | | |
| | YYCARSPYGHYAMDYWG | CRQHYSTPFTFGSGTKLEI | | |
| | QGTSVTVSS (SEQ ID NO: | K (SEQ ID NO: 487) | | |
| | 486) | | | |
| Lintuzumab | QVQLVQSGAEVKKPGSSV | DIQMTQSPSSLSASVGD | na | na |
| (Format: Whole | KVSCKASGYTFTDYNMH | RVTITCRASESVDNYGISF | | |
| mAb | WVRQAPGQGLEWIGYIYP | MNWFQQKPGKAPKLLIY | | |
| Radiolabelled) | YNGGTGYNQKFKSKATIT | AASNQGSGVPSRFSGSG | | |
| | ADESTNTAYMELSSLRSED | SGTDFTLTISSLQPDDFAT | | |
| | TAVYYCARGRPAMDYWG | YYCQQSKEVPWTFGQGT | | |
| | QGTLVTVSS (SEQ ID NO: | KVEIK (SEQ ID NO: 489) | | |
| | 488) | | | |
| Lirilumab | QVQLVQSGAEVKKPGSSV | EIVLTQSPVTLSLSPGERA | na | na |
| (Format: Whole | KVSCKASGGTFSFYAISWV | TLSCRASQSVSSYLAWYQ | | |
| mAb) | RQAPGQGLEWMGGFIPIF | QKPGQAPRLLIYDASNRA | | |
| | GAANYAQKFQGRVTITAD | TGIPARFSGSGSGTDFTLT | | |
| | ESTSTAYMELSSLRSDDTA | ISSLEPEDFAVYYCQQRS | | |
| | VYYCARIPSGSYYYDYDMD | NWMYTFGQGTKLEIK | | |
| | VWGQGTTVTVSS (SEQ ID | (SEQ ID NO: 491) | | |
| | NO: 490) | | | |
| Lodelcizumab | QVQLVQSGAEVKKPGASV | QIVLTQSPATLSVSPGER | na | na |
| (Format: Whole | KVSCKASGYTFSTMYMS | ATLSCRASQSVSYMHWY | | |
| mAb) | WVRQAPGQGLEWMGRI | QQKPGQAPRLLIYGVFRR | | |
| | DPANEHTNYAQKFQGRV | ATGIPDRFSGSGSGTDFT | | |
| | TMTRDTSISTAYMELSRLT | LTIGRLEPEDFAVYYCLQ | | |
| | SDDTAVYYCARSYYYYNM | WSSDPPTFGQGTKLEIK | | |
| | DYWGQGTLVTVSS (SEQ | (SEQ ID NO: 493) | | |
| | ID NO: 492) | | | |
| Lokivetmab | EVQLVESGGDLVKPGGSL | EIVMTQSPASLSLSQEEK | na | na |
| (Format: Canine | RLSCVASGFTFSNYGMSW | VTITCKASQSVSFAGTGL | | |
| Whole mAb) | VRQAPGKGLQWVATISYG | MHWYQQKPGQAPKLLI | | |
| | GSYTYYPDNIKGRFTISRD | YRASNLEAGVPSRFSGSG | | |
| | NAKNTLYLQMNSLRAEDT | SGTDFSFTISSLEPEDVAV | | |
| | AMYYCVRGYGYDTMDY | YYCQQSREYPWTFGQGT | | |
| | WGQGTLVTVSS (SEQ ID | KLEIK | | |
| | NO: 494) | (SEQ ID NO: 495) | | |
| Loncastuximab | QVQLVQPGAEVVKPGAS | EIVLTQSPAIMSASPGER | na | na |
| (Format: Whole | VKLSCKTSGYTFTSNWMH | VTMTCSASSGVNYMHW | | |
| mAb ADC) | WVKQAPGQGLEWIGEID | YQQKPGTSPRRWIYDTS | | |
| | PSDSYTNYNQNFQGKAKL | KLASGVPARFSGSGSGTS | | |
| | TVDKSTSTAYMEVSSLRSD | YSLTISSMEPEDAATYYC | | |
| | DTAVYYCARGSNPYYYAM | HQRGSYTFGGGTKLEIK | | |
| | DYWGQGTSVTVSS | (SEQ ID NO: 497) | | |
| | (SEQ ID NO: 496) | | | |
| Lorukafusp | EVQLVQSGAEVEKPGASV | DVVMTQTPLSLPVTPGE | na | na |
| (Format: Whole | KISCKASGSSFTGYNMNW | PASISCRSSQSLVHRNGN | | |
| mAb Fusion) | VRQNIGKSLEWIGAIDPYY | TYLHWYLQKPGQSPKLLI | | |
| | GGTSYNQKFKGRATLTVD | HKVSNRFSGVPDRFSGS | | |
| | KSTSTAYMHLKSLRSEDTA | GSGTDFTLKISRVEAEDL | | |
| | VYYCVSGMEYWGQGTSV | GVYFCSQSTHVPPLTFGA | | |
| | TVSS (SEQ ID NO: 498) | GTKLELK | | |
| | | (SEQ ID NO: 499) | | |
| Lorvotuzumab | QVQLVESGGGVVQPGRSL | DVVMTQSPLSLPVTLGQ | na | na |
| (Format: Whole | RLSCAASGFTFSSFGMHW | PASISCRSSQIIIHSDGNTY | | |
| mAb ADC) | VRQAPGKGLEWVAYISSG | LEWFQQRPGQSPRRLIYK | | |
| | SFTIYYADSVKGRFTISRDN | VSNRFSGVPDRFSGSGS | | |
| | SKNTLYLQMNSLRAEDTA | GTDFTLKISRVEAEDVGV | | |
| | VYYCARMRKGYAMDYW | YYCFQGSHVPHTFGQGT | | |
| | GQGTLVTVSS | KVEIK | | |
| | (SEQ ID NO: 500) | (SEQ ID NO: 501) | | |
| Losatuxizumab | EVQLQESGPGLVKPSQTLS | DIQMTQSPSSMSVSVGD | na | na |
| (Serclutamab) | LTCTVSGYSISRDFAWNWI | RVTITCHSSQDINSNIGW | | |
| (Format: Whole | RQPPGKGLEWMGYISYN | LQQKPGKSFKGLIYHGTN | | |
| mAb ADC) | GNTRYQPSLKSRITISRDTS | LDDGVPSRFSGSGSGTDY | | |
| | KNQFFLKLNSVTAADTATY | TLTISSLQPEDFATYYCVQ | | |
| | YCVTASRGFPYWGQGTLV | YAQFPWTFGGGTKLEIK | | |
| | TVSS (SEQ ID NO: 502) | (SEQ ID NO: 503) | | |
| Lucatumumab | QVQLVESGGGVVQPGRSL | DIVMTQSPLSLTVTPGEP | na | na |
| (Format: Whole | RLSCAASGFTFSSYGMHW | ASISCRSSQSLLYSNGYNY | | |
| mAb) | VRQAPGKGLEWVAVISYE | LDWYLQKPGQSPQVLISL | | |
| | ESNRYHADSVKGRFTISRD | GSNRASGVPDRFSGSGS | | |
| | NSKITLYLQMNSLRTEDTA | GTDFTLKISRVEAEDVGV | | |
| | VYYCARDGGIAAPGPDYW | YYCMQARQTPFTFGPGT | | |
| | GQGTLVTVSS (SEQ ID | KVDIR (SEQ ID NO: 505) | | |
| | NO: 504) | | | |
| Lulizumab | na | DIQMTQSPSSLSASVGD | na | na |
| (Format: Single | | RVTITCRASRPIWPFLEW | | |
| Domain Variable | | YQQKPGKAPKLLIYFTSRL | | |
| Fragment; L) | | RHGVPSRFSGSGSGTCFT | | |
| | | LTISSLQPEDFATYYCLQN | | |
| | | VANPATFSQGTKVEIK | | |
| | | (SEQ ID NO: 506) | | |
| Lumiliximab | EVQLVESGGGLAKPGGSL | DIQMTQSPSSLSASVGD | na | na |
| (Format: Whole | RLSCAASGFRFTFNNYYM | RVTITCRASQDIRYYLNW | | |
| mAb) | DWVRQAPGQGLEWVSRI | YQQKPGKAPKLLIYVASSL | | |
| | SSSGDPTWYADSVKGRFTI | QSGVPSRFSGSGSGTEFT | | |
| | SRENANNTLFLQMNSLRA | LTVSSLQPEDFATYYCLQ | | |
| | EDTAVYYCASLTTGSDSW | VYSTPRTFGQGTKVEIK | | |
| | GQGVLVTVSS (SEQ ID | (SEQ ID NO: 508) | | |
| | NO: 507) | | | |
| Lumretuzumab | QVQLVQSGAEVKKPGASV | DIVMTQSPDSLAVSLGER | na | na |
| (Format: Whole | KVSCKASGYTFRSSYISWV | ATINCKSSQSVLNSGNQK | | |
| mAb) | RQAPGQGLEWMGWIYA | NYLTWYQQKPGQPPKLL | | |
| | GTGSPSYNQKLQGRVTM | IYWASTRESGVPDRFSGS | | |
| | TTDTSTSTAYMELRSLRSD | GSGTDFTLTISSLQAEDV | | |
| | DTAVYYCARHRDYYSNSLT | AVYYCQSDYSYPYTFGQ | | |
| | YWGQGTLVTVSS (SEQ ID | GTKLEIK (SEQ ID NO: | | |
| | NO: 509) | 510) | | |
| Lupartumab | EVQLLESGGGLVQPGGSL | ESVLTQPPSVSGAPGQR | na | na |
| (Format: Whole | RLSCAASGFTFSNAWMS | VTISCTGSSSNIGAGYVV | | |
| mAb ADC) | WVRQAPGKGLEWVSYISS | HWYQQLPGTAPKLLIYD | | |
| | SGSTIYYADSVKGRFTISRD | NNKRPSGVPDRFSGSKS | | |
| | NSKNTLYLQMNSLRAEDT | GTSASLAISGLRSEDEADY | | |
| | AVYYCAREGLWAFDYWG | YCAAWDDRLNGPVFGG | | |
| | QGTLVTVSS (SEQ ID NO: | GTKLTVL (SEQ ID NO: | | |
| | 511) | 512) | | |
| Lutikizumab | EVQLVESGGGVVQPGRSL | DIQMTQSPSSLSASVGD | QVQLVESGGGVV | DIQMTQSPSSVS |
| (Format: | RLSCSASGFIFSRYDMSWV | RVTITCRASGNIHNYLTW | QPGRSLRLSCTASG | ASVGDRVTITCRA |
| Bispecific Dual | RQAPGKGLEWVAYISHGG | YQQTPGKAPKLLIYNAKT | FTFSMFGVHWVR | SQGISSWLAWYQ |
| Variable Domain | AGTYYPDSVKGRFTISRDN | LADGVPSRFSGSGSGTDY | QAPGKGLEWVAA | QKPGKAPKLLIYE |
| IG) | SKNTLFLQMDSLRPEDTG | TFTISSLQPEDIATYYCQH | VSYDGSNKYYAESV | ASNLETGVPSRFS |
| | VYFCARGGVTKGYFDVW | FWSIPYTFGQGTKLQIT | KGRFTISRDNSKNIL | GSGSGSDFTLTISS |
| | GQGTPVTVSS (SEQ ID | (SEQ ID NO: 514) | FLQMDSLRLEDTA | LQPEDFATYYCQ |
| | NO: 513) | | VYYCARGRPKVVIP | QTSSFLLSFGGGT |
| | | | APLAHWGQGTLV | KVEHK (SEQ ID |
| | | | TFSS (SEQ ID NO: | NO: 516) |
| | | | 515) | |
| Maftivimab | EVQLVESGGGLVQPGGSL | DIQMTQSPSSLSASVGD | na | na |
| (Format: Whole | RLSCAASGFTSSSYAMNW | RVTITCRASQSISSFLNWY | | |
| mAb) | VRQAPGKGLEWVSTISGM | QQKPGKAPKLLIYAASSL | | |
| | GGSTYYADSVKGRFTISRD | QSGVPSRFSGSGSGTDFT | | |
| | NSKNTLYLQMNSLRAEDT | LTISSLQPEDFATYYCQQS | | |
| | AVYYCAKRGYPHSFDIWG | YSTLTFGQGTRLEIK (SEQ | | |
| | QGTMVTVSS (SEQ ID | ID NO: 518) | | |
| | NO: 517) | | | |
| Magrolimab | QVQLVQSGAEVKKPGASV | DIVMTQSPLSLPVTPGEP | na | na |
| (Format: Whole | KVSCKASGYTFTNYNMH | ASISCRSSQSIVYSNGNTY | | |
| mAb) | WVRQAPGQRLEWMGTIY | LGWYLQKPGQSPQLLIYK | | |
| | PGNDDTSYNQKFKDRVTI | VSNRFSGVPDRFSGSGS | | |
| | TADTSASTAYMELSSLRSE | GTDFTLKISRVEAEDVGV | | |
| | DTAVYYCARGGYRAMDY | YYCFQGSHVPYTFGQGT | | |
| | WGQGTLVTVSS (SEQ ID | KLEIK (SEQ ID NO: 520) | | |
| | NO: 519) | | | |
| Margetuximab | QVQLQQSGPELVKPGASL | DIVMTQSHKFMSTSVGD | na | na |
| (Format: Whole | KLSCTASGFNIKDTYIHWV | RVSITCKASQDVNTAVA | | |
| mAb) | KQRPEQGLEWIGRIYPTN | WYQQKPGHSPKLLIYSAS | | |
| | GYTRYDPKFQDKATITADT | FRYTGVPDRFTGSRSGTD | | |
| | SSNTAYLQVSRLTSEDTAV | FTFTISSVQAEDLAVYYC | | |
| | YYCSRWGGDGFYAMDY | QQHYTTPPTFGGGTKVEI | | |
| | WGQGASVTVSS (SEQ ID | K (SEQ ID NO: 522) | | |
| | NO: 521) | | | |
| Marstacimab | EVQLLESGGGLVQPGGSL | QSVLTQPPSVSGAPGQR | na | na |
| (Format: Whole | RLSCAASGFTFSSYAMSW | VTISCTGSSSNIGAGYDV | | |
| mAb) | VRQAPGKGLEWVSAISGS | HWYQQLPGTAPKLLIYG | | |
| | GGSTYYADSVKGRFTISRD | NSNRPSGVPDRFSGSKS | | |
| | NSKNTLYLQMNSLRAEDT | GTSASLAITGLQAEDEAD | | |
| | AVYYCAILGATSLSAFDIW | YYCQSYDSSLSGSGVFGG | | |
| | GQGTMVTVSS (SEQ ID | GTKLTVL (SEQ ID NO: | | |
| | NO: 523) | 524) | | |
| Matuzumab | QVQLVQSGAEVKKPGASV | DIQMTQSPSSLSASVGD | na | na |
| (Format: Whole | KVSCKASGYTFTSHWMH | RVTITCSASSSVTYMYWY | | |
| mAb) | WVRQAPGQGLEWIGEFN | QQKPGKAPKLLIYDTSNL | | |
| | PSNGRTNYNEKFKSKATM | ASGVPSRFSGSGSGTDYT | | |
| | TVDTSTNTAYMELSSLRSE | FTISSLQPEDIATYYCQQ | | |
| | DTAVYYCASRDYDYDGRY | WSSHIFTFGQGTKVEIK | | |
| | FDYWGQGTLVTVSS (SEQ | (SEQ ID NO: 526) | | |
| | ID NO: 525) | | | |
| Mavrilimumab | QVQLVQSGAEVKKPGASV | QSVLTQPPSVSGAPGQR | na | na |
| (Format: Whole | KVSCKVSGYTLTELSIHWV | VTISCTGSGSNIGAPYDV | | |
| mAb) | RQAPGKGLEWMGGFDPE | SWYQQLPGTAPKLLIYHN | | |
| | ENEIVYAQRFQGRVTMTE | NKRPSGVPDRFSGSKSGT | | |
| | DTSTDTAYMELSSLRSEDT | SASLAITGLQAEDEADYY | | |
| | AVYYCAIVGSFSPLTLGLW | CATVEAGLSGSVFGGGT | | |
| | GQGTMVTVSS | KLTVL | | |
| | (SEQ ID NO: 527) | (SEQ ID NO: 528) | | |
| Mepolizumab | QVTLRESGPALVKPTQTLT | DIVMTQSPDSLAVSLGER | na | na |
| (Format: Whole | LTCTVSGFSLTSYSVHWVR | ATINCKSSQSLLNSGNQK | | |
| mAb) | QPPGKGLEWLGVIWASG | NYLAWYQQKPGQPPKLL | | |
| | GTDYNSALMSRLSISKDTS | IYGASTRESGVPDRFSGS | | |
| | RNQVVLTMTNMDPVDTA | GSGTDFTLTISSLQAEDV | | |
| | TYYCARDPPSSLLRLDYWG | AVYYCQNVHSFPFTFGG | | |
| | RGTPVTVSS (SEQ ID NO: | GTKLEIK (SEQ ID NO: | | |
| | 529) | 530) | | |
| Milatuzumab | QVQLQQSGSELKKPGASV | DIQLTQSPLSLPVTLGQP | na | na |
| (Format: Whole | KVSCKASGYTFTNYGVNW | ASISCRSSQSLVHRNGNT | | |
| mAb) | IKQAPGQGLQWMGWIN | YLHWFQQRPGQSPRLLIY | | |
| | PNTGEPTFDDDFKGRFAF | TVSNRFSGVPDRFSGSGS | | |
| | SLDTSVSTAYLQISSLKADD | GTDFTLKISRVEAEDVGV | | |
| | TAVYFCSRSRGKNEAWFA | YFCSQSSHVPPTFGAGTR | | |
| | YWGQGTLVTVSS (SEQ ID | LEIK (SEQ ID NO: 532) | | |
| | NO: 531) | | | |
| Mirikizumab | QVQLVQSGAEVKKPGSSV | DIQMTQSPSSLSASVGD | na | na |
| (Format: Whole | KVSCKASGYKFTRYVMH | RVTITCKASDHILKFLTWY | | |
| mAb) | WVRQAPGQGLEWMGYI | QQKPGKAPKLLIYGATSL | | |
| | NPYNDGTNYNEKFKGRVT | ETGVPSRFSGSGSGTDFT | | |
| | ITADKSTSTAYMELSSLRSE | LTISSLQPEDFATYYCQM | | |
| | DTAVYYCARNWDTGLWG | YWSTPFTFGGGTKVEIK | | |
| | QGTTVTVSS (SEQ ID NO: | (SEQ ID NO: 534) | | |
| | 533) | | | |
| Mirvetuximab | QVQLVQSGAEVVKPGASV | DIVLTQSPLSLAVSLGQPA | na | na |
| (Format: Whole | KISCKASGYTFTGYFMNW | IISCKASQSVSFAGTSLM | | |
| mAb ADC) | VKQSPGQSLEWIGRIHPY | HWYHQKPGQQPRLLIYR | | |
| | DGDTFYNQKFQGKATLTV | ASNLEAGVPDRFSGSGSK | | |
| | DKSSNTAHMELLSLTSEDF | TDFTLTISPVEAEDAATYY | | |
| | AVYYCTRYDGSRAMDYW | CQQSREYPYTFGGGTKLE | | |
| | GQGTTVTVSS (SEQ ID | IK (SEQ ID NO: 536) | | |
| | NO: 535) | | | |
| Mitazalimab | EVQLLESGGGLVQPGGSL | QSVLTQPPSASGTPGQR | na | na |
| (Vanalimab) | RLSCAASGFTFSTYGMHW | VTISCTGSSSNIGAGYNV | | |
| (Format: Whole | VRQAPGKGLEWLSYISGG | YWYQQLPGTAPKLLIYG | | |
| mAb) | SSYIFYADSVRGRFTISRDN | NINRPSGVPDRFSGSKSG | | |
| | SENALYLQMNSLRAEDTA | TSASLAISGLRSEDEADYY | | |
| | VYYCARILRGGSGMDLW | CAAWDKSISGLVFGGGT | | |
| | GQGTLVTVSS | KLTVL (SEQ ID NO: 538) | | |
| | (SEQ ID NO: 537) | | | |
| Modotuximab | QVQLQQPGAELVEPGGS | DIVMTQAAFSNPVTLGT | na | na |
| (Format: Whole | VKLSCKASGYTFTSHWMH | SASISCRSSKSLLHSNGITY | | |
| mAb) | WVKQRPGQGLEWIGEIN | LYWYLQKPGQSPQLLIYQ | | |
| | PSSGRNNYNEKFKSKATLT | MSNLASGVPDRFSSSGS | | |
| | VDKSSSTAYMQFSSLTSED | GTDFTLRISRVEAEDVGV | | |
| | SAVYYCVRYYGYDEAMDY | YYCAQNLELPYTFGGGTK | | |
| | WGQGTSVTVSS (SEQ ID | LEIK (SEQ ID NO: 540) | | |
| | NO: 539) | | | |
| Mogamulizumab | EVQLVESGGDLVQPGRSL | DVLMTQSPLSLPVTPGEP | na | na |
| (Format: Whole | RLSCAASGFIFSNYGMSW | ASISCRSSRNIVHINGDTY | | |
| mAb) | VRQAPGKGLEWVATISSA | LEWYLQKPGQSPQLLIYK | | |
| | STYSYYPDSVKGRFTISRD | VSNRFSGVPDRFSGSGS | | |
| | NAKNSLYLQMNSLRVEDT | GTDFTLKISRVEAEDVGV | | |
| | ALYYCGRHSDGNFAFGYW | YYCFQGSLLPWTFGQGT | | |
| | GQGTLVTVSS | KVEIK (SEQ ID NO: 542) | | |
| | (SEQ ID NO: 541) | | | |
| Monalizumab | QVQLVQSGAEVKKPGASV | DIQMTQSPSSLSASVGD | na | na |
| (Format: Whole | KVSCKASGYTFTSYWMN | RVTITCRASENIYSYLAWY | | |
| mAb) | WVRQAPGQGLEWMGRI | QQKPGKAPKLLIYNAKTL | | |
| | DPYDSETHYAQKLQGRVT | AEGVPSRFSGSGSGTDFT | | |
| | MTTDTSTSTAYMELRSLRS | LTISSLQPEDFATYYCQH | | |
| | DDTAVYYCARGGYDFDVG | HYGTPRTFGGGTKVEIK | | |
| | TLYWFFDVWGQGTTVTV | (SEQ ID NO: 544) | | |
| | SS (SEQ ID NO: 543) | | | |
| Mosunetuzumab | EVQLVQSGAEVKKPGASV | DIVMTQSPDSLAVSLGER | EVQLVESGGGLVQ | DIQMTQSPSSLSA |
| (Format: | KVSCKASGYTFTNYYIHWV | ATINCKSSQSLLNSRTRK | PGGSLRLSCAASGY | SVGDRVTITCRAS |
| Bispecific mAb) | RQAPGQGLEWIGWIYPG | NYLAWYQQKPGQPPKLL | TFTSYNMHWVRQ | SSVSYMHWYQQ |
| | DGNTKYNEKFKGRATLTA | IYWASTRESGVPDRFSGS | APGKGLEWVGAIY | KPGKAPKPLIYAP |
| | DTSTSTAYLELSSLRSEDTA | GSGTDFTLTISSLQAEDV | PGNGDTSYNQKFK | SNLASGVPSRFSG |
| | VYYCARDSYSNYYFDYWG | AVYYCTQSFILRTFGQGT | GRFTISVDKSKNTL | SGSGTDFTLTISSL |
| | QGTLVTVSS | KVEIK (SEQ ID NO: 546) | YLQMNSLRAEDTA | QPEDFATYYCQQ |
| | (SEQ ID NO: 545) | | VYYCARVVYYSNSY | WSFNPPTFGQGT |
| | | | WYFDVWGQGTLV | KVEIK (SEQ ID |
| | | | TVSS (SEQ ID NO: | NO: 548) |
| | | | 547) | |
| Motavizumab | QVTLRESGPALVKPTQTLT | DIQMTQSPSTLSASVGD | na | na |
| (Format: Whole | LTCTFSGFSLSTAGMSVG | RVTITCSASSRVGYMHW | | |
| mAb) | WIRQPPGKALEWLADIW | YQQKPGKAPKLLIYDTSKL | | |
| | WDDKKHYNPSLKDRLTISK | ASGVPSRFSGSGSGTEFT | | |
| | DTSKNQVVLKVTNMDPA | LTISSLQPDDFATYYCFQG | | |
| | DTATYYCARDMIFNFYFD | SGYPFTFGGGTKVEIK | | |
| | VWGQGTTVTVSS (SEQ ID | (SEQ ID NO: 550) | | |
| | NO: 549) | | | |
| Moxetumomab | EVQLVESGGGLVKPGGSL | DIQMTQTTSSLSASLGDR | na | na |
| (Format: Fv | KLSCAASGFAFSIYDMSW | VTISCRASQDISNYLNWY | | |
| Fusion) | VRQTPEKCLEWVAYISSG | QQKPDGTVKLLIYYTSILH | | |
| | GGTTYYPDTVKGRFTISRD | SGVPSRFSGSGSGTDYSL | | |
| | NAKNTLYLQMSSLKSEDT | TISNLEQEDFATYFCQQG | | |
| | AMYYCARHSGYGTHWGV | NTLPWTFGCGTKLEI | | |
| | LFAYWGQGTLVTVSA | (SEQ ID NO: 552) | | |
| | (SEQ ID NO: 551) | | | |
| Murlentamab | QVRLVQSGAEVKKPGASV | DIQMTQSPSTLSASVGD | na | na |
| (Format: Whole | KVSCKASGYTFTSYHIHWV | RVTITCRASSSVRYIAWY | | |
| mAb) | RQAPGQRLEWMGWIYP | QQKPGKAPKLLTYPTSSL | | |
| | GDDSTKYSQKFQGRVTITR | KSGVPSRFSGSGSGTEFT | | |
| | DTSASTAYMELSSLRSEDT | LTISSLQPDDFATYYCLQ | | |
| | AVYYCTRGDRFAYWGQG | WSSYPWTFGGGTKVEIK | | |
| | TLVTVSS (SEQ ID NO: | (SEQ ID NO: 554) | | |
| | 553) | | | |
| Muromonab | QVQLQQSGAELARPGASV | QIVLTQSPAIMSASPGEK | na | na |
| (Zolimomab) | KMSCKASGYTFTRYTMH | VTMTCSASSSVSYMNW | | |
| (Format: Whole | WVKQRPGQGLEWIGYIN | YQQKSGTSPKRWIYDTSK | | |
| mAb) | PSRGYTNYNQKFKDKATL | LASGVPAHFRGSGSGTSY | | |
| | TTDKSSSTAYMQLSSLTSE | SLTISGMEAEDAATYYCQ | | |
| | DSAVYYCARYYDDHYCLD | QWSSNPFTFGSGTKLEIN | | |
| | YWGQGTTLTVSS (SEQ ID | (SEQ ID NO: 556) | | |
| | NO: 555) | | | |
| Namilumab | QVQLVQSGAEVKKPGASV | DIQMTQSPSSVSASVGD | na | na |
| (Format: Whole | KVSCKAFGYPFTDYLLHW | RVTIACRASQNIRNILNW | | |
| mAb) | VRQAPGQGLEWVGWLN | YQQRPGKAPQLLIYAASN | | |
| | PYSGDTNYAQKFQGRVT | LQSGVPSRFSGSGSGTDF | | |
| | MTRDTSISTAYMELSRLRS | TLTINSLQPEDFATYYCQ | | |
| | DDTAVYYCTRTTLISVYFDY | QSYSMPRTFGGGTKLEIK | | |
| | WGQGTMVTVSS (SEQ ID | (SEQ ID NO: 558) | | |
| | NO: 557) | | | |
| Naptumomab | EVQLQQSGPDLVKPGASV | SIVMTQTPTSLLVSAGDR | na | na |
| (Format: Fab | KISCKASGYSFTGYYMHW | VTITCKASQSVSNDVAW | | |
| Fusion) | VKQSPGKGLEWIGRINPN | YQQKPGQSPKLLISYTSSR | | |
| | NGVTLYNQKFKDKATLTV | YAGVPDRFSGSGYGTDF | | |
| | DKSSTTAYMELRSLTSEDS | TLTISSVQAEDAAVYFCQ | | |
| | AVYYCARSTMITNYVMDY | QDYNSPPTFGGGTKLEIK | | |
| | WGQGTSVTVSS (SEQ ID | (SEQ ID NO: 560) | | |
| | NO: 559) | | | |
| Naratuximab | QVQVQESGPGLVAPSQTL | DIQMTQSPSSLSVSVGER | na | na |
| (Format: Whole | SITCTVSGFSLTTSGVSWV | VTITCRASENIRSNLAWY | | |
| mAb ADC) | RQPPGKGLEWLGVIWGD | QQKPGKSPKLLVNVATN | | |
| | GSTNYHPSLKSRLSIKKDHS | LADGVPSRFSGSGSGTDY | | |
| | KSQVFLKLNSLTAADTATY | SLKINSLQPEDFGTYYCQ | | |
| | YCAKGGYSLAHWGQGTL | HYWGTTWTFGQGTKLEI | | |
| | VTVSS (SEQ ID NO: 561) | K (SEQ ID NO: 562) | | |
| Narnatumab | EVQLVESGGGLVQPGGSL | EIVLTQSPATLSLSPGERA | na | na |
| (Format: Whole | RLSCAASGFTFSSYLMTW | TLSCRASQSVSRYLAWYQ | | |
| mAb) | VRQAPGKGLEWVANIKQ | QKPGQAPRLLIYDASNRA | | |
| | DGSEKYYVDSVKGRFTISR | TGIPARFSGSGSGTDFTLT | | |
| | DNAKNSLNLQMNSLRAE | ISSLEPEDFAVYYCQQRS | | |
| | DTAVYYCTRDGYSSGRHY | NWPRTFGQGTKVEIK | | |
| | GMDVWGQGTTVIVSS | (SEQ ID NO: 564) | | |
| | (SEQ ID NO: 563) | | | |
| Natalizumab | QVQLVQSGAEVKKPGASV | DIQMTQSPSSLSASVGD | na | na |
| (Format: Whole | KVSCKASGFNIKDTYIHWV | RVTITCKTSQDINKYMA | | |
| mAb) | RQAPGQRLEWMGRIDPA | WYQQTPGKAPRLLIHYTS | | |
| | NGYTKYDPKFQGRVTITA | ALQPGIPSRFSGSGSGRD | | |
| | DTSASTAYMELSSLRSEDT | YTFTISSLQPEDIATYYCL | | |
| | AVYYCAREGYYGNYGVYA | QYDNLWTFGQGTKVEIK | | |
| | MDYWGQGTLVTVSS | (SEQ ID NO: 566) | | |
| | (SEQ ID NO: 565) | | | |
| Navivumab | QVQLVQSGAEVKKPGASV | EVVLTQSPGTLALPPGER | na | na |
| (Format: Whole | KVSCKTSGYSFSTYGVSWV | ATLSCRASHRVGSTYIAW | | |
| mAb) | RQAPGQGPEWVGWISAY | YQQKSGQAPRRLIYGAS | | |
| | TGITDYAQKFQGRVTLTTD | NRATDIPDRFSGSGSGTD | | |
| | ATTATAFLDLRSLRPDDTA | FTLTIRRLEPEDSAVYYCQ | | |
| | TYFCARDKVQGRVEVGSG | QFSVSPWTFGQGTRVEI | | |
| | GRHDYWGQGTLVIVSS | K (SEQ ID NO: 568) | | |
| | (SEQ ID NO: 567) | | | |
| Navicixizumab | QVQLVQSGAEVKKPGASV | DIVMTQSPDSLAVSLGER | QVQLVQSGAEVKK | DIVMTQSPDSLA |
| (Format: | KISCKASGYSFTAYYIHWV | ATISCRASESVDNYGISF | PGASVKVSCKASG | VSLGERATISCRAS |
| Bispecific mAb) | KQAPGQGLEWIGYISNYN | MKWFQQKPGQPPKLLIY | YTFTNYWMHWVR | ESVDNYGISFMK |
| | RATNYNQKFKGRVTFTTD | AASNQGSGVPDRFSGSG | QAPGQGLEWMG | WFQQKPGQPPKL |
| | TSTSTAYMELRSLRSDDTA | SGTDFTLTISSLQAEDVAV | DINPSNGRTSYKEK | LIYAASNQGSGVP |
| | VYYCARDYDYDVGMDYW | YYCQQSKEVPWTFGGGT | FKRRVTLSVDKSSS | DRFSGSGSGTDFT |
| | GQGTLVTVSS (SEQ ID | KVEIK (SEQ ID NO: 570) | TAYMELSSLRSEDT | LTISSLQAEDVAV |
| | NO: 569) | | AVYFCTIHYDDKYY | YYCQQSKEVPWT |
| | | | PLMDYWGQGTLV | FGGGTKVEIK |
| | | | TVSS (SEQ ID NO: | (SEQ ID NO: 572) |
| | | | 571) | |
| Naxitamab | QVQLVESGPGVVQPGRSL | EIVMTQTPATLSVSAGER | na | na |
| (Format: Whole | RISCAVSGFSVTNYGVHW | VTITCKASQSVSNDVTW | | |
| mAb) | VRQPPGKGLEWLGVIWA | YQQKPGQAPRLLIYSASN | | |
| | GGITNYNSAFMSRLTISKD | RYSGVPARFSGSGYGTEF | | |
| | NSKNTVYLQMNSLRAEDT | TFTISSVQSEDFAVYFCQ | | |
| | AMYYCASRGGHYGYALDY | QDYSSFGQGTKLEIK | | |
| | WGQGTLVTVSS (SEQ ID | (SEQ ID NO: 574) | | |
| | NO: 573) | | | |
| Necitumumab | QVQLQESGPGLVKPSQTL | EIVMTQSPATLSLSPGER | na | na |
| (Format: Whole | SLTCTVSGGSISSGDYYWS | ATLSCRASQSVSSYLAWY | | |
| mAb) | WIRQPPGKGLEWIGYIYYS | QQKPGQAPRLLIYDASN | | |
| | GSTDYNPSLKSRVTMSVD | RATGIPARFSGSGSGTDF | | |
| | TSKNQFSLKVNSVTAADT | TLTISSLEPEDFAVYYCHQ | | |
| | AVYYCARVSIFGVGTFDY | YGSTPLTFGGGTKAEIK | | |
| | WGQGTLVTVSS (SEQ ID | (SEQ ID NO: 576) | | |
| | NO: 575) | | | |
| Nemolizumab | QVQLVQSGAEVKKPGASV | DIQMTQSPSSLSASVGD | na | na |
| (Format: Whole | KVSCKASGYTFTGYIMNW | RVTITCQASEDIYSFVAW | | |
| mAb) | VRQAPGQGLEWMGLINP | YQQKPGKAPKLLIYNAQT | | |
| | YNGGTDYNPQFQDRVTIT | EAQGVPSRFSGSGSGTD | | |
| | ADKSTSTAYMELSSLRSED | FTLTISSLQPEDFATYYCQ | | |
| | TAVYYCARDGYDDGPYTL | HHYDSPLTFGGGTKVEIK | | |
| | ETWGQGTLVTVSS (SEQ | (SEQ ID NO: 578) | | |
| | ID NO: 577) | | | |
| Nesvacumab | EVQLVESGGGLVQPGGSL | EIVLTQSPGTLSLSPGERA | na | na |
| (Format: Whole | RLSCAASGFTFSSYDIHWV | TLSCRASQSVSSTYLAWY | | |
| mAb) | RQATGKGLEWVSAIGPAG | QQKPGQAPRLLIYGASSR | | |
| | DTYYPGSVKGRFTISRENA | ATGIPDRFSGSGSGTDFT | | |
| | KNSLYLQMNSLRAGDTAV | LTISRLEPEDFAVYYCQHY | | |
| | YYCARGLITFGGLIAPFDY | DNSQTFGQGTKVEIK | | |
| | WGQGTLVTVSS (SEQ ID | (SEQ ID NO: 580) | | |
| | NO: 579) | | | |
| Netakimab | QVQLVQSGGGLVQAGGS | EIVLTQSPGTLSLSPGERA | na | na |
| (Format: Whole | LRLSCAASGGTFATSPMG | TLSCRASQSVSSSYLAWY | | |
| mAb) | WLRQAPGKGTEFVAAISP | QQKPGQAPRLLIYDASSR | | |
| | SGGDRIYADSVKGRFTISR | ATGIPDRFSGSGSGTDFT | | |
| | DNAGYFIYLQMNSLKPED | LTISRLEPEDFAVYYCQQY | | |
| | TAVYYCAVRRRFDGTSYYT | SYSPVTFGQGTKVEIK | | |
| | GDYDSWGQGTLVTVSS | (SEQ ID NO: 582) | | |
| | (SEQ ID NO: 581) | | | |
| Nidanilimab | QVQLVQSGAEVKKPGSSV | DIQMTQSPSSLSASVGD | na | na |
| (Format: Whole | KVSCKASGYAFTSSWMN | RVTITCQASQGINNYLN | | |
| mAb) | WVRQAPGQGLEWMGRI | WYQQKPGKAPKLLIHYTS | | |
| | YPGDGNTHYAQKFQGRV | GLHAGVPSRFSGSGSGT | | |
| | TLTADKSTSTAYMELSSLR | DYTLTISSLEPEDVATYYC | | |
| | SEDTAVYYCGEGYLDPMD | QQYSILPWTFGGGTKVEI | | |
| | YWGQGTLVTVSS (SEQ ID | K (SEQ ID NO: 584) | | |
| | NO: 583) | | | |
| Nimacimab | QVQLVQSGAEVKKPGSSV | EIVLTQSPATLSLSPGERA | na | na |
| (Format: Whole | KVSCKASGYEFSYYWMN | TLSCRASQSVSSSYLHWY | | |
| mAb) | WVRQAPGQGLEWMGQI | QQKPGQAPRLLIYSTSNL | | |
| | YPGDGETKYAQKFQGRVT | ASGIPARFSGSGSGTDFT | | |
| | ITADKSTSTAYMELSSLRSE | LTISRLEPEDFAVYYCHQY | | |
| | DTAVYYCARSHGNYLPYW | HRSPPTFGQGTKVEIK | | |
| | GQGTLVTVSS (SEQ ID | (SEQ ID NO: 586) | | |
| | NO: 585) | | | |
| Nimotuzumab | QVQLQQSGAEVKKPGSSV | DIQMTQSPSSLSASVGD | na | na |
| (Format: Whole | KVSCKASGYTFTNYYIYWV | RVTITCRSSQNIVHSNGN | | |
| mAb) | RQAPGQGLEWIGGINPTS | TYLDWYQQTPGKAPKLLI | | |
| | GGSNFNEKFKTRVTITADE | YKVSNRFSGVPSRFSGSG | | |
| | SSTTAYMELSSLRSEDTAF | SGTDFTFTISSLQPEDIAT | | |
| | YFCTRQGLWFDSDGRGFD | YYCFQYSHVPWTFGQGT | | |
| | FWGQGTTVTVSS (SEQ ID | KLQIT (SEQ ID NO: 588) | | |
| | NO: 587) | | | |
| Nirsevimab | QVQLVQSGAEVKKPGSSV | DIQMTQSPSSLSAAVGD | na | na |
| (Format: Whole | MVSCQASGGLLEDYIINW | RVTITCQASQDIVNYLN | | |
| mAb) | VRQAPGQGPEWMGGIIP | WYQQKPGKAPKLLIYVAS | | |
| | VLGTVHYGPKFQGRVTITA | NLETGVPSRFSGSGSGTD | | |
| | DESTDTAYMELSSLRSEDT | FSLTISSLQPEDVATYYCQ | | |
| | AMYYCATETALVVSETYLP | QYDNLPLTFGGGTKVEIK | | |
| | HYFDNWGQGTLVTVSS | (SEQ ID NO: 590) | | |
| | (SEQ ID NO: 589) | | | |
| Nivolumab | QVQLVESGGGVVQPGRSL | EIVLTQSPATLSLSPGERA | na | na |
| (Format: Whole | RLDCKASGITFSNSGMHW | TLSCRASQSVSSYLAWYQ | | |
| mAb) | VRQAPGKGLEWVAVIWY | QKPGQAPRLLIYDASNRA | | |
| | DGSKRYYADSVKGRFTISR | TGIPARFSGSGSGTDFTLT | | |
| | DNSKNTLFLQMNSLRAED | ISSLEPEDFAVYYCQQSS | | |
| | TAVYYCATNDDYWGQGT | NWPRTFGQGTKVEIK | | |
| | LVTVSS (SEQ ID NO: 591) | (SEQ ID NO: 592) | | |
| Obexelimab | EVQLVESGGGLVKPGGSL | DIVMTQSPATLSLSPGER | na | na |
| (Format: Whole | KLSCAASGYTFTSYVMHW | ATLSCRSSKSLQNVNGNT | | |
| mAb) | VRQAPGKGLEWIGYINPY | YLYWFQQKPGQSPQLLIY | | |
| | NDGTKYNEKFQGRVTISS | RMSNLNSGVPDRFSGSG | | |
| | DKSISTAYMELSSLRSEDTA | SGTEFTLTISSLEPEDFAVY | | |
| | MYYCARGTYYYGTRVFDY | YCMQHLEYPITFGAGTKL | | |
| | WGQGTLVTVSS (SEQ ID | EIK (SEQ ID NO: 594) | | |
| | NO: 593) | | | |
| Obiltoxaximab | QVQLQQSGPELKKPGASV | DIQMTQSPSSLSASVGD | na | na |
| (Format: Whole | KVSCKDSGYAFSSSWMN | RVTITCRASQDIRNYLNW | | |
| mAb) | WVRQAPGQGLEWIGRIY | YQQKPGKAVKLLIYYTSRL | | |
| | PGDGDTNYNGKFQGRVTI | LPGVPSRFSGSGSGTDYS | | |
| | TADKSSSTAYMELSSLRSE | LTISSQEQEDIGTYFCQQ | | |
| | DTAVYFCARSGLLRYAMD | GNTLPWTFGQGTKVEIR | | |
| | YWGQGTLVTVSS (SEQ ID | (SEQ ID NO: 596) | | |
| | NO: 595) | | | |
| Obinutuzumab | QVQLVQSGAEVKKPGSSV | DIVMTQTPLSLPVTPGEP | na | na |
| (Afutuzumab) | KVSCKASGYAFSYSWINW | ASISCRSSKSLLHSNGITYL | | |
| (Format: Whole | VRQAPGQGLEWMGRIFP | YWYLQKPGQSPQLLIYQ | | |
| mAb) | GDGDTDYNGKFKGRVTIT | MSNLVSGVPDRFSGSGS | | |
| | ADKSTSTAYMELSSLRSED | GTDFTLKISRVEAEDVGV | | |
| | TAVYYCARNVFDGYWLVY | YYCAQNLELPYTFGGGTK | | |
| | WGQGTLVTVSS (SEQ ID | VEIK (SEQ ID NO: 598) | | |
| | NO: 597) | | | |
| Ocaratuzumab | EVQLVQSGAEVKKPGESL | EIVLTQSPGTLSLSPGERA | na | na |
| (Format: Whole | KISCKGSGRTFTSYNMHW | TLSCRASSSVPYIHWYQQ | | |
| mAb) | VRQMPGKGLEWMGAIYP | KPGQAPRLLIYATSALAS | | |
| | LTGDTSYNQKSKLQVTISA | GIPDRFSGSGSGTDFTLTI | | |
| | DKSISTAYLQWSSLKASDT | SRLEPEDFAVYYCQQWL | | |
| | AMYYCARSTYVGGDWQF | SNPPTFGQGTKLEIK | | |
| | DVWGKGTTVTVSS (SEQ | (SEQ ID NO: 600) | | |
| | ID NO: 599) | | | |
| Ocrelizumab | EVQLVESGGGLVQPGGSL | DIQMTQSPSSLSASVGD | na | na |
| (Format: Whole | RLSCAASGYTFTSYNMHW | RVTITCRASSSVSYMHW | | |
| mAb) | VRQAPGKGLEWVGAIYPG | YQQKPGKAPKPLIYAPSN | | |
| | NGDTSYNQKFKGRFTISVD | LASGVPSRFSGSGSGTDF | | |
| | KSKNTLYLQMNSLRAEDT | TLTISSLQPEDFATYYCQQ | | |
| | AVYYCARVVYYSNSYWYF | WSFNPPTFGQGTKVEIK | | |
| | DVWGQGTLVTVSS (SEQ | (SEQ ID NO: 602) | | |
| | ID NO: 601) | | | |
| Ofatumumab | EVQLVESGGGLVQPGRSL | EIVLTQSPATLSLSPGERA | na | na |
| (Format: Whole | RLSCAASGFTFNDYAMH | TLSCRASQSVSSYLAWYQ | | |
| mAb) | WVRQAPGKGLEWVSTIS | QKPGQAPRLLIYDASNRA | | |
| | WNSGSIGYADSVKGRFTIS | TGIPARFSGSGSGTDFTLT | | |
| | RDNAKKSLYLQMNSLRAE | ISSLEPEDFAVYYCQQRS | | |
| | DTALYYCAKDIQYGNYYYG | NWPITFGQGTRLEIK | | |
| | MDVWGQGTTVTVSS | (SEQ ID NO: 604) | | |
| | (SEQ ID NO: 603) | | | |
| Olaratumab | QLQLQESGPGLVKPSETLS | EIVLTQSPATLSLSPGERA | na | na |
| (Format: Whole | LTCTVSGGSINSSSYYWG | TLSCRASQSVSSYLAWYQ | | |
| mAb) | WLRQSPGKGLEWIGSFFY | QKPGQAPRLLIYDASNRA | | |
| | TGSTYYNPSLRSRLTISVDT | TGIPARFSGSGSGTDFTLT | | |
| | SKNQFSLMLSSVTAADTA | ISSLEPEDFAVYYCQQRS | | |
| | VYYCARQSTYYYGSGNYY | NWPPAFGQGTKVEIK | | |
| | GWFDRWDQGTLVTVSS | (SEQ ID NO: 606) | | |
| | (SEQ ID NO: 605) | | | |
| Oleclumab | EVQLLESGGGLVQPGGSL | QSVLTQPPSASGTPGQR | na | na |
| (Format: Whole | RLSCAASGFTFSSYAYSWV | VTISCSGSLSNIGRNPVN | | |
| mAb) | RQAPGKGLEWVSAISGSG | WYQQLPGTAPKLLIYLDN | | |
| | GRTYYADSVKGRFTISRDN | LRLSGVPDRFSGSKSGTS | | |
| | SKNTLYLQMNSLRAEDTA | ASLAISGLQSEDEADYYC | | |
| | VYYCARLGYGRVDEWGR | ATWDDSHPGWTFGGGT | | |
| | GTLVTVSS | KLTVL (SEQ ID NO: 608) | | |
| | (SEQ ID NO: 607) | | | |
| Olendalizumab | QVQLVQSGAEVKKPGASV | DIQMTQSPSSLSASVGD | na | na |
| (Format: Whole | KVSCKASGYTFTDYSMDW | RVTITCRASESVDSYGNS | | |
| mAb) | VRQAPGQGLEWMGAIHL | FMHWYQQKPGKAPKLLI | | |
| | NTGYTNYNQKFKGRVTM | YRASNLESGVPSRFSGSG | | |
| | TRDTSTSTVYMELSSLRSE | SGTDFTLTISSLQPEDFAT | | |
| | DTAVYYCARGFYDGYSPM | YYCQQSNEDPYTFGGGT | | |
| | DYWGQGTTVTVSS (SEQ | KVEIK | | |
| | ID NO: 609) | (SEQ ID NO: 610) | | |
| Olinvacimab | QMQLVQSGAEVKKPGAS | NFMLTQPPSVSVSPGKT | na | na |
| (Tanibirumab) | VKLSCKASGYTFSSYWMH | ARITCRGDNLGDVNVH | | |
| (Format: Whole | WVRQAPGQRLEWMGEI | WYQQRPGQAPVLVMYY | | |
| mAb) | NPGNGHTNYNEKFKSRVT | DADRPSGIPERFSGSNSG | | |
| | ITVDKSASTAYMELSSLRSE | NTATLTISGVEAGDEADY | | |
| | DTAVYYCAKIWGPSLTSPF | YCQVWDRTSEYVFGTGT | | |
| | DYWGQGTLVTVSS (SEQ | KVTVL | | |
| | ID NO: 611) | (SEQ ID NO: 612) | | |
| Olokizumab | EVQLVESGGGLVQPGGSL | DIQMTQSPSSLSASVGD | na | na |
| (Format: Whole | RLSCAASGFNFNDYFMN | RVTITCQASQDIGISLSW | | |
| mAb) | WVRQAPGKGLEWVAQM | YQQKPGKAPKLLIYNAN | | |
| | RNKNYQYGTYYAESLEGRF | NLADGVPSRFSGSGSGT | | |
| | TISRDDSKNSLYLQMNSLK | DFTLTISSLQPEDFATYYC | | |
| | TEDTAVYYCARESYYGFTS | LQHNSAPYTFGQGTKLEI | | |
| | YWGQGTLVTVSS (SEQ ID | K (SEQ ID NO: 614) | | |
| | NO: 613) | | | |
| Omalizumab | EVQLVESGGGLVQPGGSL | DIQLTQSPSSLSASVGDR | na | na |
| (Format: Whole | RLSCAVSGYSITSGYSWN | VTITCRASQSVDYDGDSY | | |
| mAb) | WIRQAPGKGLEWVASITY | MNWYQQKPGKAPKLLIY | | |
| | DGSTNYNPSVKGRITISRD | AASYLESGVPSRFSGSGS | | |
| | DSKNTFYLQMNSLRAEDT | GTDFTLTISSLQPEDFATY | | |
| | AVYYCARGSHYFGHWHF | YCQQSHEDPYTFGQGTK | | |
| | AVWGQGTLVTVSS (SEQ | VEIK (SEQ ID NO: 616) | | |
| | ID NO: 615) | | | |
| Omburtamab | QVQLQQSGAELVKPGASV | DIVMTQSPATLSVTPGD | na | na |
| (Format: Whole | KLSCKASGYTFTNYDINWV | RVSLSCRASQSISDYLHW | | |
| mAb | RQRPEQGLEWIGWIFPGD | YQQKSHESPRLLIKYASQS | | |
| Radiolabelled) | GSTQYNEKFKGKATLTTDT | ISGIPSRFSGSGSGSDFTL | | |
| | SSSTAYMQLSRLTSEDSAV | SINSVEPEDVGVYYCQNG | | |
| | YFCARQTTATWFAYWGQ | HSFPLTFGAGTKLELK | | |
| | GTLVTVSA (SEQ ID NO: | (SEQ ID NO: 618) | | |
| | 617) | | | |
| Onartuzumab | EVQLVESGGGLVQPGGSL | DIQMTQSPSSLSASVGD | na | na |
| (Format: Fab + | RLSCAASGYTFTSYWLHW | RVTITCKSSQSLLYTSSQK | | |
| di-Fc) | VRQAPGKGLEWVGMIDP | NYLAWYQQKPGKAPKLL | | |
| | SNSDTRFNPNFKDRFTISA | IYWASTRESGVPSRFSGS | | |
| | DTSKNTAYLQMNSLRAED | GSGTDFTLTISSLQPEDFA | | |
| | TAVYYCATYRSYVTPLDYW | TYYCQQYYAYPWTFGQG | | |
| | GQGTLVTVSS (SEQ ID | TKVEIK (SEQ ID NO: | | |
| | NO: 619) | 620) | | |
| Ontamalimab | QVQLVQSGAEVKKPGASV | DIVMTQTPLSLSVTPGQP | na | na |
| (Format: Whole | KVSCKASGYTFTSYG1NWV | ASISCKSSQSLLHTDGTTY | | |
| mAb) | RQAPGQGLEWMGWISV | LYWYLQKPGQPPQLLIYE | | |
| | YSGNTNYAQKVQGRVTM | VSNRFSGVPDRFSGSGS | | |
| | TADTSTSTAYMDLRSLRSD | GTDFTLKISRVEAEDVGIY | | |
| | DTAVYYCAREGSSSSGDYY | YCMQNIQLPWTFGQGT | | |
| | YGMDVWGQGTTVTVSS | KVEIK (SEQ ID NO: 622) | | |
| | (SEQ ID NO: 621) | | | |
| Ontuxizumab | QVQLQESGPGLVRPSQTL | DIQMTQSPSSLSASVGD | na | na |
| (Format: Whole | SLTCTASGYTFTDYVIHWV | RVTITCRASQNVGTAVA | | |
| mAb) | KQPPGRGLEWIGYINPYD | WLQQTPGKAPKLLIYSAS | | |
| | DDTTYNQKFKGRVTMLV | NRYTGVPSRFSGSGSGTD | | |
| | DTSSNTAYLRLSSVTAEDT | YTFTISSLQPEDIATYYCQ | | |
| | AVYYCARRGNSYDGYFDY | QYTNYPMYTFGQGTKV | | |
| | SMDYWGSGTPVTVSS | QIK (SEQ ID NO: 624) | | |
| | (SEQ ID NO: 623) | | | |
| Onvatilimab | QVQLVQSGAEVKKPGSSV | DIQMTQSPSSLSASVGD | na | na |
| (Format: Whole | KVSCKASGGTFSSYAISWV | RVTITCRASQSIDTRLNW | | |
| mAb) | RQAPGQGLEWMGGIIPIF | YQQKPGKAPKLLIYSASSL | | |
| | GTANYAQKFQGRVTITAD | QSGVPSRFSGSGSGTDFT | | |
| | ESTSTAYMELSSLRSEDTA | LTISSLQPEDFATYYCQQS | | |
| | VYYCARSSYGWSYEFDYW | AYNPITFGQGTKVEIK | | |
| | GQGTLVTVSS (SEQ ID | (SEQ ID NO: 626) | | |
| | NO: 625) | | | |
| Opicinumab | EVQLLESGGGLVQPGGSL | DIQMTQSPATLSLSPGER | na | na |
| (Format: Whole | RLSCAASGFTFSAYEMKW | ATLSCRASQSVSSYLAWY | | |
| mAb) | VRQAPGKGLEWVSVIGPS | QQKPGQAPRLLIYDASN | | |
| | GGFTFYADSVKGRFTISRD | RATGIPARFSGSGSGTDF | | |
| | NSKNTLYLQMNSLRAEDT | TLTISSLEPEDFAVYYCQQ | | |
| | AVYYCATEGDNDAFDIWG | RSNWPMYTFGQGTKLEI | | |
| | QGTTVTVSS (SEQ ID NO: | K (SEQ ID NO: 628) | | |
| | 627) | | | |
| Oportuzumab | EVQLVQSGPGLVQPGGSV | DIQMTQSPSSLSASVGD | na | na |
| (Format: scFv) | RISCAASGYTFTNYGMNW | RVTITCRSTKSLLHSNGIT | | |
| | VKQAPGKGLEWMGWIN | YLYWYQQKPGKAPKLLIY | | |
| | TYTGESTYADSFKGRFTFSL | QMSNLASGVPSRFSSSG | | |
| | DTSASAAYLQINSLRAEDT | SGTDFTLTISSLQPEDFAT | | |
| | AVYYCARFAIKGDYWGQG | YYCAQNLEIPRTFGQGTK | | |
| | TLLTVSS (SEQ ID NO: | VELK (SEQ ID NO: 630) | | |
| | 629) | | | |
| Orilanolimab | QVQLVQSGAELKKPGASV | DIQMTQSPSSLSASVGD | na | na |
| (Format: Whole | KLSCKASGYTFTSYGISWV | RVTITCKASDHINNWLA | | |
| mAb) | KQATGQGLEWIGEIYPRS | WYQQKPGQAPRLLISGA | | |
| | GNTYYNEKFKGRATLTAD | TSLETGVPSRFSGSGTGK | | |
| | KSTSTAYMELRSLRSEDSA | DYTLTISSLQPEDFATYYC | | |
| | VYFCARSTTVRPPGIWGT | QQYWSTPYTFGGGTKVE | | |
| | GTTVTVSS (SEQ ID NO: | IK (SEQ ID NO: 632) | | |
| | 631) | | | |
| Orticumab | EVQLLESGGGLVQPGGSL | QSVLTQPPSASGTPGQR | na | na |
| (Format: Whole | RLSCAASGFTFSNAWMS | VTISCSGSNTNIGKNYVS | | |
| mAb) | WVRQAPGKGLEWVSSISV | WYQQLPGTAPKLLIYANS | | |
| | GGHRTYYADSVKGRSTISR | NRPSGVPDRFSGSKSGTS | | |
| | DNSKNTLYLQMNSLRAED | ASLAISGLRSEDEADYYCA | | |
| | TAVYYCARIRVGPSGGAFD | SWDASLNGWVFGGGTK | | |
| | YWGQGTLVTVSS (SEQ ID | LTVL (SEQ ID NO: 634) | | |
| | NO: 633) | | | |
| Osocimab | EVQLLESGGGLVQPGGSL | DIQMTQSPSSLSASVGD | na | na |
| (Format: Whole | RLSCAASGFTFSQYGMD | RVTITCQASQDISNYLNW | | |
| mAb) | WVRQAPGKGLEWVSGIG | YQQKPGKAPKLLIYDASN | | |
| | PSGGSTVYADSVKGRFTIS | LETGVPSRFSGSGSGTDF | | |
| | RDNSKNTLYLQMNSLRAE | TFTISSLQPEDIATYYCQQ | | |
| | DTAVYYCTRGGPYYYYGM | ADSFPVTFGGGTKVEIK | | |
| | DVWGQGTTVTVSS (SEQ | (SEQ ID NO: 636) | | |
| | ID NO: 635) | | | |
| Otelixizumab | EVQLLESGGGLVQPGGSL | DIQLTQPNSVSTSLGSTV | na | na |
| (Format: Whole | RLSCAASGFTFSSFPMAW | KLSCTLSSGNIENNYVHW | | |
| mAb) | VRQAPGKGLEWVSTISTS | YQLYEGRSPTTMIYDDDK | | |
| | GGRTYYRDSVKGRFTISRD | RPDGVPDRFSGSIDRSSN | | |
| | NSKNTLYLQMNSLRAEDT | SAFLTIHNVAIEDEAIYFC | | |
| | AVYYCAKFRQYSGGFDYW | HSYVSSFNVFGGGTKLTV | | |
| | GQGTLVTVSS (SEQ ID | L (SEQ ID NO: 638) | | |
| | NO: 637) | | | |
| Otilimab | QVQLVESGGGLVQPGGSL | DIELTQPPSVSVAPGQTA | na | na |
| (Format: Whole | RLSCAASGFTFSSYWMN | RISCSGDSIGKKYAYWYQ | | |
| mAb) | WVRQAPGKGLEWVSGIE | QKPGQAPVLVIYKKRPSG | | |
| | NKYAGGATYYAASVKGRF | IPERFSGSNSGNTATLTIS | | |
| | TISRDNSKNTLYLQMNSLR | GTQAEDEADYYCSAWG | | |
| | AEDTAVYYCARGFGTDFW | DKGMVFGGGTKLTVL | | |
| | GQGTLVTVSS (SEQ ID | (SEQ ID NO: 640) | | |
| | NO: 639) | | | |
| Otlertuzumab | EVQLVQSGAEVKKPGESL | EIVLTQSPATLSLSPGERA | na | na |
| (Format: di- | KISCKGSGYSFTGYNMNW | TLSCRASENVYSYLAWYQ | | |
| scFv+Fc) | VRQMPGKGLEWMGNID | QKPGQAPRLLIYFAKTLA | | |
| | PYYGGTTYNRKFKGQVTIS | EGIPARFSGSGSGTDFTLT | | |
| | ADKSISTAYLQWSSLKASD | ISSLEPEDFAVYYCQHHS | | |
| | TAMYYCARSVGPFDSWG | DNPWTFGQGTKVEIK | | |
| | QGTLVTVSS (SEQ ID NO: | (SEQ ID NO: 642) | | |
| | 641) | | | |
| Oxelumab | EVQLLESGGGLVQPGGSL | DIQMTQSPSSLSASVGD | na | na |
| (Format: Whole | RLSCAASGFTFNSYAMSW | RVTITCRASQGISSWLAW | | |
| mAb) | VRQAPGKGLEWVSIISGSG | YQQKPEKAPKSLIYAASSL | | |
| | GFTYYADSVKGRFTISRDN | QSGVPSRFSGSGSGTDFT | | |
| | SRTTLYLQMNSLRAEDTA | LTISSLQPEDFATYYCQQY | | |
| | VYYCAKDRLVAPGTFDYW | NSYPYTFGQGTKLEIK | | |
| | GQGALVTVSS (SEQ ID | (SEQ ID NO: 644) | | |
| | NO: 643) | | | |
| Ozanezumab | QVQLVQSGAEVKKPGASV | DIVMTQSPLSNPVTLGQ | na | na |
| (Format: Whole | KVSCKASGYTFTSYWMH | PVSISCRSSKSLLYKDGKT | | |
| mAb) | WVRQAPGQGLEWIGNIN | YLNWFLQRPGQSPQLLIY | | |
| | PSNGGTNYNEKFKSKATM | LMSTRASGVPDRFSGGG | | |
| | TRDTSTSTAYMELSSLRSE | SGTDFTLKISRVEAEDVG | | |
| | DTAVYYCELMQGYWGQG | VYYCQQLVEYPLTFGQGT | | |
| | TLVTVSS (SEQ ID NO: | KLEIK | | |
| | 645) | (SEQ ID NO: 646) | | |
| Ozoralizumab | EVQLVESGGGLVQPGGSL | na | EVQLVESGGGLVQ | na |
| (Format: | RLSCAASGFTFSDYWMY | | PGNSLRLSCAASGF | |
| Bispecific | WVRQAPGKGLEWVSEIN | | TFSSFGMSWVRQ | |
| Single | TNGLITKYPDSVKGRFTISR | | APGKGLEWVSSIS | |
| Domains (VH- | DNAKNTLYLQMNSLRPED | | GSGSDTLYADSVK | |
| VH′-VH) | TAVYYCARSPSGFNRGQG | | GRFTISRDNAKTTL | |
| | TLVTVSS (SEQ ID NO: | | YLQMNSLRPEDTA | |
| | 647) | | VYYCTIGGSLSRSS | |
| | | | QGTLVTVSS (SEQ | |
| | | | ID NO: 648) | |
| Pabinafusp | EVQLVQSGAEVKKPGESL | DIVMTQTPLSLSVTPGQP | na | na |
| (Format: Whole | KISCKGSGYSFTNYWLGW | ASISCRSSQSLVHSNGNT | | |
| mAb Fusion) | VRQMPGKGLEWMGDIYP | YLHWYLQKPGQSPQLLIY | | |
| | GGDYPTYSEKFKVQVTISA | KVSNRFSGVPDRFSGSGS | | |
| | DKSISTAYLQWSSLKASDT | GTDFTLKISRVEAEDVGV | | |
| | AMYYCARSGNYDEVAYW | YYCSQSTHVPWTFGQGT | | |
| | GQGTLVTVSS (SEQ ID | KVEIK | | |
| | NO: 649) | (SEQ ID NO: 650) | | |
| Palivizumab | QVTLRESGPALVKPTQTLT | DIQMTQSPSTLSASVGD | na | na |
| (Format: Whole | LTCTFSGFSLSTSGMSVG | RVTITCKCQLSVGYMHW | | |
| mAb) | WIRQPPGKALEWLADIW | YQQKPGKAPKLLIYDTSKL | | |
| | WDDKKDYNPSLKSRLTISK | ASGVPSRFSGSGSGTEFT | | |
| | DTSKNQVVLKVTNMDPA | LTISSLQPDDFATYYCFQG | | |
| | DTATYYCARSMITNWYFD | SGYPFTFGGGTKLEIK | | |
| | VWGAGTTVTVSS (SEQ ID | | | |
| | NO: 651) | (SEQ ID NO: 652) | | |
| Pamrevlumab | EGQLVQSGGGLVHPGGSL | DIQMTQSPSSLSASVGD | na | na |
| (Format: Whole | RLSCAGSGFTFSSYGMHW | RVTITCRASQGISSWLAW | | |
| mAb) | VRQAPGKGLEWVSGIGTG | YQQKPEKAPKSLIYAASSL | | |
| | GGTYSTDSVKGRFTISRDN | QSGVPSRFSGSGSGTDFT | | |
| | AKNSLYLQMNSLRAEDM | LTISSLQPEDFATYYCQQY | | |
| | AVYYCARGDYYGSGSFFD | NSYPPTFGQGTKLEIK | | |
| | CWGQGTLVTVSS (SEQ ID | (SEQ ID NO: 654) | | |
| | NO: 653) | | | |
| Panitumumab | QVQLQESGPGLVKPSETLS | DIQMTQSPSSLSASVGD | na | na |
| (Format: Whole | LTCTVSGGSVSSGDYYWT | RVTITCQASQDISNYLNW | | |
| mAb) | WIRQSPGKGLEWIGHIYYS | YQQKPGKAPKLLIYDASN | | |
| | GNTNYNPSLKSRLTISIDTS | LETGVPSRFSGSGSGTDF | | |
| | KTQFSLKLSSVTAADTAIYY | TFTISSLQPEDIATYFCQH | | |
| | CVRDRVTGAFDIWGQGT | FDHLPLAFGGGTKVEIK | | |
| | MVTVSS (SEQ ID NO: | | | |
| | 655) | (SEQ ID NO: 656) | | |
| Panobacumab | EEQVVESGGGFVQPGGSL | DVVMTQSPLSLPVTLGQ | na | na |
| (Format: Whole | RLSCAASGFTFSPYWMH | PASISCRSSQSLVYSDGNT | | |
| mAb) | WVRQAPGKGLVWVSRIN | YLNWFQQRPGQSPRRLI | | |
| | SDGSTYYADSVKGRFTISR | YKVSNRDSGVPDRFSGS | | |
| | DNARNTLYLQMNSLRAED | GSGTDFTLKISRVEAEDV | | |
| | TAVYYCARDRYYGPEMW | GVYYCMQGTHWPLTFG | | |
| | GQGTMVTVSS (SEQ ID | GGTKVEIK (SEQ ID NO: | | |
| | NO: 657) | 658) | | |
| Parsatuzumab | EVQLVESGGGLVQPGGSL | DIQMTQSPSSLSASVGD | na | na |
| (Format: Whole | RLSCAASGYTFIDYYMNW | RVTITCRTSQSLVHINAIT | | |
| mAb) | VRQAPGKGLEWVGDINL | YLHWYQQKPGKAPKLLIY | | |
| | DNSGTHYNQKFKGRFTISR | RVSNRFSGVPSRFSGSGS | | |
| | DKSKNTAYLQMNSLRAED | GTDFTLTISSLQPEDFATY | | |
| | TAVYYCAREGVYHDYDDY | YCGQSTHVPLTFGQGTK | | |
| | AMDYWGQGTLVTVSS | VEIK | | |
| | (SEQ ID NO: 659) | (SEQ ID NO: 660) | | |
| Pasotuxizumab | QVQLVESGGGLVKPGESL | DIQMTQSPSSLSASVGD | EVQLVESGGGLVQ | QTVVTQEPSLTVS |
| (Format: | RLSCAASGFTFSDYYMYW | RVTITCKASQNVDTNVA | PGGSLKLSCAASGF | PGGTVTLTCGSST |
| Bispecific scFv) | VRQAPGKGLEWVAIISDG | WYQQKPGQAPKSLIYSA | TFNKYAMNWVRQ | GAVTSGNYPNW |
| | GYYTYYSDIIKGRFTISRDN | SYRYSDVPSRFSGSASGT | APGKGLEWVARIR | VQQKPGQAPRGL |
| | AKNSLYLQMNSLKAEDTA | DFTLTISSVQSEDFATYYC | SKYNNYATYYADS | IGGTKFLAPGTPA |
| | VYYCARGFPLLRHGAMDY | QQYDSYPYTFGGGTKLEI | VKDRFTISRDDSKN | RFSGSLLGGKAAL |
| | WGQGTLVTVSS (SEQ ID | K (SEQ ID NO: 662) | TAYLQMNNLKTED | TLSGVQPEDEAEY |
| | NO: 661) | | TAVYYCVRHGNFG | YCVLWYSNRWVF |
| | | | NSYISYWAYWGQ | GGGTKLTVL (SEQ |
| | | | GTLVTVSS (SEQ ID | ID NO: 664) |
| | | | NO: 663) | |
| Pateclizumab | EVQLVESGGGLVQPGGSL | DIQMTQSPSSLSASVGD | na | na |
| (Format: Whole | RLSCAASGYTFTSYVIHWV | RVTITCRASQAVSSAVA | | |
| mAb) | RQAPGKGLEWVGYNNPY | WYQQKPGKAPKLLIYSAS | | |
| | NAGTNYNEKFKGRFTISSD | HRYTGVPSRFSGSGSGTD | | |
| | KSKNTAYLQMNSLRAEDT | FTLTISSLQPEDFATYYCQ | | |
| | AVYYCSRPTMLPWFAYW | ESYSTPWTFGQGTKVEIK | | |
| | GQGTLVTVSS (SEQ ID | (SEQ ID NO: 666) | | |
| | NO: 665) | | | |
| Patritumab | QVQLQQWGAGLLKPSETL | DIEMTQSPDSLAVSLGER | na | na |
| (Format: Whole | SLTCAVYGGSFSGYYWSW | ATINCRSSQSVLYSSSNR | | |
| mAb) | IRQPPGKGLEWIGEINHSG | NYLAWYQQNPGQPPKLL | | |
| | STNYNPSLKSRVTISVETSK | IYWASTRESGVPDRFSGS | | |
| | NQFSLKLSSVTAADTAVYY | GSGTDFTLTISSLQAEDV | | |
| | CARDKWTWYFDLWGRG | AVYYCQQYYSTPRTFGQ | | |
| | TLVTVSS (SEQ ID NO: | GTKVEIK (SEQ ID NO: | | |
| | 667) | 668) | | |
| Pembrolizumab | QVQLVQSGVEVKKPGASV | EIVLTQSPATLSLSPGERA | na | na |
| (Lambrolizumab) | KVSCKASGYTFTNYYMYW | TLSCRASKGVSTSGYSYLH | | |
| (Format: Whole | VRQAPGQGLEWMGGINP | WYQQKPGQAPRLLIYLA | | |
| mAb) | SNGGTNFNEKFKNRVTLT | SYLESGVPARFSGSGSGT | | |
| | TDSSTTTAYMELKSLQFDD | DFTLTISSLEPEDFAVYYC | | |
| | TAVYYCARRDYRFDMGFD | QHSRDLPLTFGGGTKVEI | | |
| | YWGQGTTVTVSS (SEQ ID | K (SEQ ID NO: 670) | | |
| | NO: 669) | | | |
| Pepinemab | QVQLVQSGAEVKKPGSSV | DIVMTQSPDSLAVSLGER | na | na |
| (Format: Whole | KVSCKASGYSFSDYYMHW | ATINCKASQSVDYDGDSY | | |
| mAb) | VRQAPGQGLEWMGQIN | MNWYQQKPGQPPKLLIY | | |
| | PTTGGASYNQKFKGKATIT | AASNLESGVPDRFSGSGS | | |
| | VDKSTSTAYMELSSLRSED | GTDFTLTISSLQAEDVAV | | |
| | TAVYYCARYYYGRHFDVW | YYCQQSNEDPYTFGQGT | | |
| | GQGTTVTVSS (SEQ ID | KLEIK | | |
| | NO: 671) | (SEQ ID NO: 672) | | |
| Perakizumab | EVQLVESGGGLVQPGGSL | DIQMTQSPSSLSASVGD | na | na |
| (Format: Whole | RLSCAASGFTFSDYTMLW | RVTITCRASQDINSYLSW | | |
| mAb) | VRQAPGKGLEWVAIIKSG | FQQKPGKAPKSLIVRANR | | |
| | GSYSYYPDSVKGRFTISRD | LVDGVPSRFSGSGSGQD | | |
| | NAKNSLYLQMNSLRAEDT | YSLTISSLQPEDFATYYCL | | |
| | AVYYCARDGDYGSSYGA | QYDAFPPYTFGQGTKLEI | | |
| | MDYWGQGTLVTVSS | K (SEQ ID NO: 674) | | |
| | (SEQ ID NO: 673) | | | |
| Pertuzumab | EVQLVESGGGLVQPGGSL | DIQMTQSPSSLSASVGD | na | na |
| (Format: Whole | RLSCAASGFTFTDYTMDW | RVTITCKASQDVSIGVAW | | |
| mAb) | VRQAPGKGLEWVADVNP | YQQKPGKAPKLLIYSASY | | |
| | NSGGSIYNQRFKGRFTLSV | RYTGVPSRFSGSGSGTDF | | |
| | DRSKNTLYLQMNSLRAED | TLTISSLQPEDFATYYCQQ | | |
| | TAVYYCARNLGPSFYFDY | YYIYPYTFGQGTKVEIK | | |
| | WGQGTLVTVSS (SEQ ID | (SEQ ID NO: 676) | | |
| | NO: 675) | | | |
| Pldilizumab | QVQLVQSGSELKKPGASV | EIVLTQSPSSLSASVGDRV | na | na |
| (Format: Whole | KISCKASGYTFTNYGMNW | TITCSARSSVSYMHWFQ | | |
| mAb) | VRQAPGQGLQWMGWIN | QKPGKAPKLWIYRTSNLA | | |
| | TDSGESTYAEEFKGRFVFS | SGVPSRFSGSGSGTSYCL | | |
| | LDTSVNTAYLQITSLTAEDT | TINSLQPEDFATYYCQQR | | |
| | GMYFCVRVGYDALDYWG | SSFPLTFGGGTKLEIK | | |
| | QGTLVTVSS (SEQ ID NO: | (SEQ ID NO: 678) | | |
| | 677) | | | |
| Pinatuzumab | EVQLVESGGGLVQPGGSL | DIQMTQSPSSLSASVGD | na | na |
| (Format: Whole | RLSCAASGYEFSRSWMN | RVTITCRSSQSIVHSVGNT | | |
| mAb ADC) | WVRQAPGKGLEWVGRIY | FLEWYQQKPGKAPKLLIY | | |
| | PGDGDTNYSGKFKGRFTIS | KVSNRFSGVPSRFSGSGS | | |
| | ADTSKNTAYLQMNSLRAE | GTDFTLTISSLQPEDFATY | | |
| | DTAVYYCARDGSSWDWY | YCFQGSQFPYTFGQGTK | | |
| | FDVWGQGTLVTVSS (SEQ | VEIK (SEQ ID NO: 680) | | |
| | ID NO: 679) | | | |
| Placulumab | na | DIQMTQSPSSLSASVGD | na | na |
| (Format: Single | | RVTITCRASQAIDSYLHW | | |
| Domain Variable | | YQQKPGKAPKLLIYSASN | | |
| Fragment + Fc) | | LETGVPSRFSGSGSGTDF | | |
| | | TLTISSLLPEDFATYYCQQ | | |
| | | VVWRPFTFGQGTKVEIK | | |
| | | (SEQ ID NO: 681) | | |
| Plamotamab | QVQLVQSGAEVKKPGASV | QIVLTQSPSSLSASVGDR | EVQLVESGGGLVQ | QAVVTQEPSLTVS |
| (Format: | KVSCKASGYTFTSYNMHW | VTITCRASSSVSYIHWFQ | PGGSLRLSCAASGF | PGGTVTLTCGSST |
| Bispecific Mixed | VRQAPGQGLEWMGAIYP | QKPGKSPKPLIYATSNLAS | TFSTYAMNWVRQ | GAVTTSNYANW |
| mAb and scFV) | GNGDTSYNQKFQGRVTIT | GVPVRFSGSGSGTDYTLT | APGKGLEWVGRIR | VQQKPGKSPRGLI |
| | ADKSISTAYMELSSLRSEDT | ISSLQPEDFATYYCQQWT | SKYNNYATYYADS | GGTNKRAPGVPA |
| | AVYYCARSTYYGGDWYFN | SNPPTFGGGTKVEIK | VKGRFTISRDDSKN | RFSGSLLGGKAAL |
| | VWGAGTLVTVSS (SEQ ID | (SEQ ID NO: 683) | TLYLQMNSLRAED | TISGAQPEDEADY |
| | NO: 682) | | TAVYYCVRHGNFG | YCALWYSNHWV |
| | | | DSYVSWFAYWGQ | FGGGTKLTVLEPK |
| | | | GTLVTVSS (SEQ ID | (SEQ ID NO: 685) |
| | | | NO: 684) | |
| Plozalizumab | EVQLVESGGGLVKPGGSL | DVVMTQSPLSLPVTLGQ | na | na |
| (Format: Whole | RLSCAASGFTFSAYAMNW | PASISCKSSQSLLDSDGKT | | |
| mAb) | VRQAPGKGLEWVGRIRTK | FLNWFQQRPGQSPRRLI | | |
| | NNNYATYYADSVKDRFTIS | YLVSKLDSGVPDRFSGSG | | |
| | RDDSKNTLYLQMNSLKTE | SGTDFTLKISRVEAEDVG | | |
| | DTAVYYCTTFYGNGVWG | VYYCWQGTHFPYTFGQ | | |
| | QGTLVTVSS (SEQ ID NO: | GTRLEIK (SEQ ID NO: | | |
| | 686) | 687) | | |
| Polatuzumab | EVQLVESGGGLVQPGGSL | DIQLTQSPSSLSASVGDR | na | na |
| (Format: Whole | RLSCAASGYTFSSYWIEWV | VTITCKASQSVDYEGDSF | | |
| mAb ADC) | RQAPGKGLEWIGEILPGG | LNWYQQKPGKAPKLLIY | | |
| | GDTNYNEIFKGRATFSADT | AASNLESGVPSRFSGSGS | | |
| | SKNTAYLQMNSLRAEDTA | GTDFTLTISSLQPEDFATY | | |
| | VYYCTRRVPIRLDYWGQG | YCQQSNEDPLTFGQGTK | | |
| | TLVTVSS (SEQ ID NO: | VEIK (SEQ ID NO: 689) | | |
| | 688) | | | |
| Ponezumab | QVQLVQSGAEVKKPGASV | DVVMTQSPLSLPVTLGQ | na | na |
| (Format: Whole | KVSCKASGYYTEAYYIHWV | PASISCKSSQSLLYSDAKT | | |
| mAb) | RQAPGQGLEWMGRIDPA | YLNWFQQRPGQSPRRLI | | |
| | TGNTKYAPRLQDRVTMTR | YQISRLDPGVPDRFSGSG | | |
| | DTSTSTVYMELSSLRSEDT | SGTDFTLKISRVEAEDVG | | |
| | AVYYCASLYSLPVYWGQG | VYYCLQGTHYPVLFGQG | | |
| | TTVTVSS (SEQ ID NO: | TRLEIK (SEQ ID NO: | | |
| | 690) | 691) | | |
| Porgaviximab | EVQLQESGGGLMQPGGS | DIQMTQSPASLSVSVGET | na | na |
| (Format: Whole | MKLSCVASGFTFSNYWM | VSITCRASENIYSSLAWY | | |
| mAb) | NWVRQSPEKGLEWVAEIR | QQKQGKSPQLLVYSATIL | | |
| | LKSNNYATHYAESVKGRFT | ADGVPSRFSGSGSGTQY | | |
| | ISRDDSKRSVYLQMNTLRA | SLKINSLQSEDFGTYYCQ | | |
| | EDTGIYYCTRGNGNYRAM | HFWGTPYTFGGGTKLEIK | | |
| | DYWGQGTSVTVSS (SEQ | (SEQ ID NO: 693) | | |
| | ID NO: 692) | | | |
| Prasinezumab | EVQLVESGGGLVQPGGSL | DIQMTQSPSSLSASVGD | na | na |
| (Format: Whole | RLSCAASGFTFSNYGMSW | RVTITCKSIQTLLYSSNQK | | |
| mAb) | VRQAPGKGLEWVASISSG | NYLAWFQQKPGKAPKLL | | |
| | GGSTYYPDNVKGRFTISRD | IYWASIRKSGVPSRFSGS | | |
| | DAKNSLYLQMNSLRAEDT | GSGTDFTLTISSLQPEDLA | | |
| | AVYYCARGGAGIDYWGQ | TYYCQQYYSYPLTFGGGT | | |
| | GTLVTVSS (SEQ ID NO: | KLEIK (SEQ ID NO: | | |
| | 694) | 695) | | |
| Prezalumab | EVQLVESGGGLVQPGGSL | DIQMTQSPSSLSASVGD | na | na |
| (Format: Whole | RLSCAASGFTFSSYWMSW | RVTITCRASQGISNWLA | | |
| mAb) | VRQAPGKGLEWVAYIKQD | WYQQKPEKAPKSLIYAAS | | |
| | GNEKYYVDSVKGRFTISRD | SLQSGVPSRFSGSGSGTD | | |
| | NAKNSLYLQMNSLRAEDT | FTLTISSLQPEDFATYYCQ | | |
| | AVYYCAREGILWFGDLPTF | QYDSYPRTFGQGTKVEIK | | |
| | WGQGTLVTVSS (SEQ ID | (SEQ ID NO: 697) | | |
| | NO: 696) | | | |
| Pritoxaximab | QVQLQESGAELVRSGASV | DIVMSQSHKFMSTSVGD | na | na |
| (Format: Whole | RMSCKASGYTFTSYNMH | RVSITCKASQDVGTAVA | | |
| mAb) | WVKQTPGQGLEWIGYIYP | WYQQNPGQSPKFLIYW | | |
| | GNGGTNYIQKFKGKAILTA | ASTRHTGVPDRFTGSGS | | |
| | DTSSSTAYMQISSLTSEDS | GTDFTLTITNVQSEDLAD | | |
| | AVYFCTRSPSHYSSDPYFD | YFCQQYSSYPLTFGAGTS | | |
| | YWGQGTTLTVSS (SEQ ID | LELK (SEQ ID NO: 699) | | |
| | NO: 698) | | | |
| Prolgolimab | QVQLVQSGGGLVQPGGS | QPVLTQPLSVSVALGQTA | na | na |
| (Format: Whole | LRLSCAASGFTFSSYWMY | RITCGGNNIGSKNVHWY | | |
| mAb) | WVRQVPGKGLEWVSAID | QQKPGQAPVLVIYRDSN | | |
| | TGGGRTYYADSVKGRFAIS | RPSGIPERFSGSNSGNTA | | |
| | RVNAKNTMYLQMNSLRA | TLTISRAQAGDEADYYCQ | | |
| | EDTAVYYCARDEGGGTG | VWDSSTAVFGTGTKLTV | | |
| | WGVLKDWPYGLDAWGQ | L (SEQ ID NO: 701) | | |
| | GTLVTVSS (SEQ ID NO: | | | |
| | 700) | | | |
| Quetmolimab | QVQLVQSGAEVKKPGASV | DIQMTQSPSSLSASVGD | na | na |
| (Format: Whole | KVSCKASGYTFTNYYIHWV | RVTITCRASGNIHNFLAW | | |
| mAb) | KQAPGQGLEWIGWIYPG | YQQKPGKAPKLLIYNEKT | | |
| | DGSPKFNERFKGRTTLTAD | LADGVPSRFSGSGSGTDY | | |
| | KSTNTAYMLLSSLRSEDTA | TLTISSLQPEDFATYFCQQ | | |
| | VYFCATGPTDGDYFDYW | FWSTPYTFGGGTKVEIK | | |
| | GQGTTVTVSS (SEQ ID | (SEQ ID NO: 703) | | |
| | NO: 702) | | | |
| Quilizumab | EVQLVESGGGLVQPGGSL | DIQMTQSPSSLSASVGD | na | na |
| (Format: Whole | RLSCAASGFTFSDYGIAWV | RVTITCRSSQSLVHNNAN | | |
| mAb) | RQAPGKGLEWVAFISDLA | TYLHWYQQKPGKAPKLLI | | |
| | YTIYYADTVTGRFTISRDNS | YKVSNRFSGVPSRFSGSG | | |
| | KNTLYLQMNSLRAEDTAV | SGTDFTLTISSLQPEDFAT | | |
| | YYCARDNWDAMDYWGQ | YYCSQNTLVPWTFGQGT | | |
| | GTLVTVSS (SEQ ID NO: | KVEIK (SEQ ID NO: | | |
| | 704) | 705) | | |
| Racotumomab | QVQLQQSGAELVKPGASV | DIQMTQTTSSLSASLGDR | na | na |
| (Format: Whole | KLSCKASGYTFTSYDINWV | VTISCRASQDISNYLNWY | | |
| mAb) | RQRPEQGLEWIGWIFPGD | QQKPDGTVKLLIYYTSRL | | |
| | GSTKYNEKFKGKATLTTDK | HSGVPSRFSGSGSGTDYS | | |
| | SSSTAYMQLSRLTSEDSAV | LTISNLEQEDIATYFCQQ | | |
| | YFCAREDYYDNSYYFDYW | GNTLPWTFGGGTKLEIK | | |
| | GQGTTLTVSS (SEQ ID | (SEQ ID NO: 707) | | |
| | NO: 706) | | | |
| Radretumab | EVQLLESGGGLVQPGGSL | EIVLTQSPGTLSLSPGERA | na | na |
| (Bifikafusp/ | RLSCAASGFTFSSFSMSW | TLSCRASQSVSSSFLAWY | | |
| Onfekafusp) | VRQAPGKGLEWVSSISGS | QQKPGQAPRLLIYYASSR | | |
| (Format: | SGTTYYADSVKGRFTISRD | ATGIPDRFSGSGSGTDFT | | |
| di-scFv + CH4) | NSKNTLYLQMNSLRAEDT | LTISRLEPEDFAVYYCQQT | | |
| | AVYYCAKPFPYFDYWGQG | GRIPPTFGQGTKVEIK | | |
| | TLVTVSS (SEQ ID NO: | (SEQ ID NO: 709) | | |
| | 708) | | | |
| Rafivirumab | QVQLVQSGAEVKKPGSSV | QSALTQPRSVSGSPGQS | na | na |
| (Format: Whole | KVSCKASGGTFNRYTVNW | VTISCTGTSSDIGGYNFVS | | |
| mAb) | VRQAPGQGLEWMGGIIPI | WYQQHPGKAPKLMIYD | | |
| | FGTANYAQRFQGRLTITA | ATKRPSGVPDRFSGSKSG | | |
| | DESTSTAYMELSSLRSDDT | NTASLTISGLQAEDEADY | | |
| | AVYFCARENLDNSGTYYYF | YCCSYAGDYTPGVVFGG | | |
| | SGWFDPWGQGTLVTVSS | GTKLTVL (SEQ ID NO: | | |
| | (SEQ ID NO: 710) | 711) | | |
| Ralpancizumab | QVQLVQSGAEVKKPGASV | DIQMTQSPSSLSASVGD | na | na |
| (Format: Whole | KVSCKASGYTFTSYYMHW | RVTITCKASQDVHTAVA | | |
| mAb) | VRQAPGQGLEWMGEIHP | WYQQKPGKAPKLLIYHA | | |
| | SGGRTNYNEKFKSRVTMT | SYRYTGVPSRFSGSGSGT | | |
| | RDTSTSTVYMELSSLRSED | DFTFTISSLQPEDIATYYC | | |
| | TAVYYCARERPLYASDLW | QQRYSLWRTFGQGTKLE | | |
| | GQGTTVTVSS (SEQ ID | IK (SEQ ID NO: 713) | | |
| | NO: 712) | | | |
| Ramucirumab | EVQLVQSGGGLVKPGGSL | DIQMTQSPSSVSASIGDR | na | na |
| (Format: Whole | RLSCAASGFTFSSYSMNW | VTITCRASQGIDNWLGW | | |
| mAb) | VRQAPGKGLEWVSSISSSS | YQQKPGKAPKLLIYDASN | | |
| | SYIYYADSVKGRFTISRDNA | LDTGVPSRFSGSGSGTYF | | |
| | KNSLYLQMNSLRAEDTAV | TLTISSLQAEDFAVYFCQ | | |
| | YYCARVTDAFDIWGQGT | QAKAFPPTFGGGTKVDIK | | |
| | MVTVSS (SEQ ID NO: | (SEQ ID NO: 715) | | |
| | 714) | | | |
| Ranevetmab | EVQLVESGGGLVQPGGSL | DIVMTQSPASLSLSQGET | na | na |
| (Format: Canine | RLSCVASGFSLTNNNVNW | VTITCRASEDIYNALAWY | | |
| Whole mAb) | VRQAPGKGLEWVGGVW | QQKPGQAPKLLIYNTDTL | | |
| | AGGATDYNSALKSRFTISR | HTGVPSRFSGSGSGTDFS | | |
| | DNAKNTVFLQMHSLRSED | LTISSLEPEDVAVYYCQHY | | |
| | TAVYYCARDGGYSSSTLYA | FHYPRTFGQGTKVELK | | |
| | MDAWGQGTSVTVSS | (SEQ ID NO: 717) | | |
| | (SEQ ID NO: 716) | | | |
| Ranibizumab | EVQLVESGGGLVQPGGSL | DIQLTQSPSSLSASVGDR | na | na |
| (Format: Fab) | RLSCAASGYDFTHYGMN | VTITCSASQDISNYLNWY | | |
| | WVRQAPGKGLEWVGWI | QQKPGKAPKVLIYFTSSL | | |
| | NTYTGEPTYAADFKRRFTF | HSGVPSRFSGSGSGTDFT | | |
| | SLDTSKSTAYLQMNSLRAE | LTISSLQPEDFATYYCQQY | | |
| | DTAVYYCAKYPYYYGTSH | STVPWTFGQGTKVEIK | | |
| | WYFDVWGQGTLVTVSS | (SEQ ID NO: 719) | | |
| | (SEQ ID NO: 718) | | | |
| Ravagalimab | EVQLVESGGGLVKPGGSL | DIVMTQSPDSLAVSLGER | na | na |
| (Format: Whole | RLSCAASGFTFSDYGMN | ATINCKSSQSLLNRGNQK | | |
| mAb) | WVRQAPGKGLEWIAYISS | NYLTWFQQKPGQPPKLL | | |
| | GRGNIYYADTVKGRFTISR | IYWASTRESGVPDRFSGS | | |
| | DNAKNSLYLQMNSLRAED | GSGTDFTLTISSLQAEDV | | |
| | TAVYYCARSWGYFDVWG | AVYYCQNDYTYPLTFGQ | | |
| | QGTTVTVSS (SEQ ID NO: | GTKLEIK (SEQ ID NO: | | |
| | 720) | 721) | | |
| Ravulizumab | QVQLVQSGAEVKKPGASV | DIQMTQSPSSLSASVGD | na | na |
| (Format: Whole | KVSCKASGHIFSNYWIQW | RVTITCGASENIYGALNW | | |
| mAb) | VRQAPGQGLEWMGEILP | YQQKPGKAPKLLIYGATN | | |
| | GSGHTEYTENFKDRVTMT | LADGVPSRFSGSGSGTDF | | |
| | RDTSTSTVYMELSSLRSED | TLTISSLQPEDFATYYCQN | | |
| | TAVYYCARYFFGSSPNWY | VLNTPLTFGQGTKVEIK | | |
| | FDVWGQGTLVTVSS (SEQ | (SEQ ID NO: 723) | | |
| | ID NO: 722) | | | |
| Refanezumab | QVQLVQSGSELKKPGASV | DIVMTQSPDSLAVSLGER | na | na |
| (Format: Whole | KVSCKASGYTFTNYGMN | ATINCKSSHSVLYSSNQK | | |
| mAb) | WVRQAPGQGLEWMGWI | NYLAWYQQKPGQPPKLL | | |
| | NTYTGEPTYADDFTGRFVF | IYWASTRESGVPDRFSGS | | |
| | SLDTSVSTAYLQISSLKAED | GSGTDFTLTISSLQAEDV | | |
| | TAVYYCARNPINYYGINYE | AVYYCHQYLSSLTFGQGT | | |
| | GYVMDYWGQGTLVTVSS | KLEIK (SEQ ID NO: | | |
| | (SEQ ID NO: 724) | 725) | | |
| Relatlimab | QVQLQQWGAGLLKPSETL | EIVLTQSPATLSLSPGERA | na | na |
| (Format: Whole | SLTCAVYGGSFSDYYWN | TLSCRASQSISSYLAWYQ | | |
| mAb) | WIRQPPGKGLEWIGEINH | QKPGQAPRLLIYDASNRA | | |
| | RGSTNSNPSLKSRVTLSLD | TGIPARFSGSGSGTDFTLT | | |
| | TSKNQFSLKLRSVTAADTA | ISSLEPEDFAVYYCQQRS | | |
| | VYYCAFGYSDYEYNWFDP | NWPLTFGQGTNLEIK | | |
| | WGQGTLVTVSS (SEQ ID | (SEQ ID NO: 727) | | |
| | NO: 726) | | | |
| Relfovetmab | DVQLVESGGDLVKPGGSL | EIQMTQSPSSLSASPGDR | na | na |
| (Format: Feline | RLTCVASGFTYSNYWMH | VTITCRASENIYSFLAWY | | |
| Whole mAb) | WVRQAPGKGLQWVARID | QQKPGKVPKLLIYNANTL | | |
| | PYGGGTKHNEKFKRRFTIS | AEGVPSRFSGSGSGTDFT | | |
| | RDNAKNTLYLQMNSLKTE | LTISSLEPEDAATYYCQHH | | |
| | DTATYYCVRSGYDYYFDV | FGTPFTFGSGTKLEIK | | |
| | WGQGTLVTVSS (SEQ ID | (SEQ ID NO: 729) | | |
| | NO: 728) | | | |
| Remtolumab | EVQLVESGGGLVQPGRSL | DIQMTQSPSSLSASVGD | EVQLVQSGAEVKK | EIVLTQSPDFQSV |
| (Format: | RLSCAASGFTFDDYAMH | RVTITCRASQGIRNYLAW | PGSSVKVSCKASG | TPKEKVTITCRAS |
| Bispecific Dual | WVRQAPGKGLEWVSAIT | YQQKPGKAPKLLIYAAST | GSFGGYGIGWVR | QDIGSELHWYQQ |
| Variable Domain | WNSGHIDYADSVEGRFTIS | LQSGVPSRFSGSGSGTDF | QAPGQGLEWMG | KPDQPPKLLIKYAS |
| IG) | RDNAKNSLYLQMNSLRAE | TLTISSLQPEDVATYYCQR | GITPFFGFADYAQK | HSTSGVPSRFSGS |
| | DTAVYYCAKVSYLSTASSL | YNRAPYTFGQGTKVEIK | FQGRVTITADESTT | GSGTDFTLTINGL |
| | DYWGQGTLVTVSS (SEQ | (SEQ ID NO: 731) | TAYMELSGLTSDD | EAEDAGTYYCHQ |
| | ID NO: 730) | | TAVYYCARDPNEF | TDSLPYTFGPGTK |
| | | | WNGYYSTHDFDS | VDIK (SEQ ID NO: |
| | | | WGQGTTVTVSS | 733) |
| | | | (SEQ ID NO: 732) | |
| Reslizumab | EVQLVESGGGLVQPGGSL | DIQMTQSPSSLSASVGD | na | na |
| (Format: Whole | RLSCAVSGLSLTSNSVNWI | RVTITCLASEGISSYLAWY | | |
| mAb) | RQAPGKGLEWVGLIWSN | QQKPGKAPKLLIYGANSL | | |
| | GDTDYNSAIKSRFTISRDTS | QTGVPSRFSGSGSATDYT | | |
| | KSTVYLQMNSLRAEDTAV | LTISSLQPEDFATYYCQQS | | |
| | YYCAREYYGYFDYWGQGT | YKFPNTFGQGTKVEVK | | |
| | LVTVSS (SEQ ID NO: 734) | (SEQ ID NO: 735) | | |
| Rilotumumab | QVQLQESGPGLVKPSETLS | EIVMTQSPATLSVSPGER | na | na |
| (Format: Whole | LTCTVSGGSISIYYWSWIR | ATLSCRASQSVDSNLAW | | |
| mAb) | QPPGKGLEWIGYVYYSGS | YRQKPGQAPRLLIYGAST | | |
| | TNYNPSLKSRVTISVDTSK | RATGIPARFSGSGSGTEF | | |
| | NQFSLKLNSVTAADTAVYY | TLTISSLQSEDFAVYYCQQ | | |
| | CARGGYDFWSGYFDYWG | YINWPPITFGQGTRLEIK | | |
| | QGTLVTVSS (SEQ ID NO: | (SEQ ID NO: 737) | | |
| | 736) | | | |
| Rinucumab | QLQLQESGPGLVKPSETLS | EIVLTQSPDTISLSPGERA | na | na |
| (Format: Whole | LTCTVSGGSITSSSYYWG | TLSCRASQSISSIYLAWYQ | | |
| mAb) | WIRQPPGKGLEWIGSIYYR | QKPGQAPRLLIYGASSRV | | |
| | GSTNYNPSLKSRVTISVDSS | TGIPDRFSVSGSGTDFTLT | | |
| | KNQFYLKVSSVTAVDTAVY | ISRLEPEDFAVYYCQHYGI | | |
| | YCARQNGAARPSWFDPW | SPFTFGPGTKVDIR (SEQ | | |
| | GQGTLVTVSS (SEQ ID | ID NO: 739) | | |
| | NO: 738) | | | |
| Risankizumab | QVQLVQSGAEVKKPGSSV | DIQMTQSPSSLSASVGD | na | na |
| (Format: Whole | KVSCKASGYTFTDQTIHW | RVTITCKASRDVAIAVAW | | |
| mAb) | MRQAPGQGLEWIGYIYPR | YQQKPGKVPKLLIYWAST | | |
| | DDSPKYNENFKGKVTITAD | RHTGVPSRFSGSGSRTDF | | |
| | KSTSTAYMELSSLRSEDTA | TLTISSLQPEDVADYFCH | | |
| | VYYCAIPDRSGYAWFIYW | QYSSYPFTFGSGTKLEIK | | |
| | GQGTLVTVSS (SEQ ID | (SEQ ID NO: 741) | | |
| | NO: 740) | | | |
| Rituximab | QVQLQQPGAELVKPGASV | QIVLSQSPAILSASPGEKV | na | na |
| (Format: Whole | KMSCKASGYTFTSYNMH | TMTCRASSSVSYIHWFQ | | |
| mAb) | WVKQTPGRGLEWIGAIYP | QKPGSSPKPWIYATSNLA | | |
| | GNGDTSYNQKFKGKATLT | SGVPVRFSGSGSGTSYSL | | |
| | ADKSSSTAYMQLSSLTSED | TISRVEAEDAATYYCQQ | | |
| | SAVYYCARSTYYGGDWYF | WTSNPPTFGGGTKLEIK | | |
| | NVWGAGTTVTVSA (SEQ | (SEQ ID NO: 743) | | |
| | ID NO: 742) | | | |
| Rivabazumab | EVQLVESGGGVVQPGRSL | DIQLTQSPSTLSASVGDS | na | na |
| (Format: Fab) | RLSCAASGFTFSNYPMHW | VTITCRASEGVDRWLAW | | |
| | VRQAPGKGLEWVAVISYD | YQQKPGRAPKLLIYDAST | | |
| | GSEKWYADSVKGRFTISR | LQSGVPSRFSGSGSGTEF | | |
| | DNSKNTLYLEMNSLRPED | SLTISSLQPDDVATYYCQ | | |
| | TAVYYCARNRGDIYYDFTY | HFWGTPYTFGQGTKLEIK | | |
| | AMDIWGQGTTVTVSS | (SEQ ID NO: 745) | | |
| | (SEQ ID NO: 744) | | | |
| Robatumumab | EVQLVQSGGGLVKPGGSL | EIVLTQSPGTLSVSPGERA | na | na |
| (Format: Whole | RLSCAASGFTFSSFAMHW | TLSCRASQSIGSSLHWYQ | | |
| mAb) | VRQAPGKGLEWISVIDTR | QKPGQAPRLLIKYASQSL | | |
| | GATYYADSVKGRFTISRDN | SGIPDRFSGSGSGTDFTLT | | |
| | AKNSLYLQMNSLRAEDTA | ISRLEPEDFAVYYCHQSSR | | |
| | VYYCARLGNFYYGMDVW | LPHTFGQGTKVEIK (SEQ | | |
| | GQGTTVTVSS (SEQ ID | ID NO: 747) | | |
| | NO: 746) | | | |
| Roledumab | QVQLVESGGGVVQPGRSL | AIRMTQSPSSFSASTGDR | na | na |
| (Format: Whole | RLSCTASGFTFKNYAMHW | VTITCRASQDIRNYVAWY | | |
| mAb) | VRQAPAKGLEWVATISYD | QQKSGKAPKFLIYAASTL | | |
| | GRNIQYADSVKGRFTFSRD | QSGVPSRFSGSGSGTDFT | | |
| | NSQDTLYLQLNSLRPEDTA | LTINSLQSEDFATYYCQQ | | |
| | VYYCARPVRSRWLQLGLE | YYNSPPTFGQGTRVEIT | | |
| | DAFHIWGQGTMVTVSS | (SEQ ID NO: 749) | | |
| | (SEQ ID NO: 748) | | | |
| Rolinsatamab | EVQLVQSGAEVKKPGSSV | DIQMTQSPSSVSASVGD | na | na |
| (Format: Whole | KVSCKASGYTFTTYWMH | RVTITCKASQYVGTAVA | | |
| mAb ADC) | WVRQAPGQGLEWIGEID | WYQQKPGKSPKLLIYSAS | | |
| | PSDSYSNYNQKFKDRATLT | NRYTGVPSRFSDSGSGTD | | |
| | VDKSTSTAYMELSSLRSED | FTLTISSLQPEDFATYFCQ | | |
| | TAVYYCARNGGLGPAWFS | QYSSYPWTFGGGTKVEIK | | |
| | YWGQGTLVTVSS (SEQ ID | (SEQ ID NO: 751) | | |
| | NO: 750) | | | |
| Romilkimab | EVQLKESGPGLVAPGGSLS | DIVLTQSPASLAVSLGQR | QVQLQQSGPELVK | DIQMTQSPASLSV |
| (Format: | ITCTVSGFSLTDSSINWVR | ATISCRASESVDSYGQSY | PGASVKISCKASGY | SVGDTITLTCHAS |
| Bispecific Dual | QPPGKGLEWLGMIWGD | MHWYQQKAGQPPKLLI | SFTSYWIHWIKQR | QNIDVWLSWFQ |
| Variable Domain | GRIDYADALKSRLSISKDSS | YLASNLESGVPARFSGSG | PGQGLEWIGMIDP | QKPGNIPKLLIYKA |
| IG) | KSQVFLEMTSLRTDDTATY | SRTDFTLTIDPVQAEDAA | SDGETRLNQRFQG | SNLHTGVPSRFSG |
| | YCARDGYFPYAMDFWGQ | TYYCQQNAEDSRTFGGG | RATLTVDESTSTAY | SGSGTGFTLTISSL |
| | GTSVTVSS (SEQ ID NO: | TKLEIK (SEQ ID NO: | MQLRSPTSEDSAV | QPEDIATYYCQQ |
| | 752) | 753) | YYCTRLKEYGNYDS | AHSYPFTFGGGTK |
| | | | FYFDVWGAGTLVT | LEIK (SEQ ID NO: |
| | | | VSS (SEQ ID NO: | 755) |
| | | | 754) | |
| Romosozumab | EVQLVQSGAEVKKPGASV | DIQMTQSPSSLSASVGD | na | na |
| (Format: Whole | KVSCKASGYTFTDYNMH | RVTITCRASQDISNYLNW | | |
| mAb) | WVRQAPGQGLEWMGEI | YQQKPGKAPKLLIYYTSRL | | |
| | NPNSGGAGYNQKFKGRV | LSGVPSRFSGSGSGTDFT | | |
| | TMTTDTSTSTAYMELRSLR | LTISSLQPEDFATYYCQQ | | |
| | SDDTAVYYCARLGYDDIYD | GDTLPYTFGGGTKVEIK | | |
| | DWYFDVWGQGTTVTVSS | (SEQ ID NO: 757) | | |
| | (SEQ ID NO: 756) | | | |
| Rontalizumab | EVQLVESGGGLVQPGGSL | DIQMTQSPSSLSASVGD | na | na |
| (Format: Whole | RLSCATSGYTFTEYIIHWVR | RVTITCRASQSVSTSSYSY | | |
| mAb) | QAPGKGLEWVASINPDYD | MHWYQQKPGKAPKVLIS | | |
| | ITNYNQRFKGRFTISLDKSK | YASNLESGVPSRFSGSGS | | |
| | RTAYLQMNSLRAEDTAVY | GTDFTLTISSLQPEDFATY | | |
| | YCASWISDFFDYWGQGTL | YCQHSWGIPRTFGQGTK | | |
| | VTVSS (SEQ ID NO: 758) | VEIK (SEQ ID NO: 759) | | |
| Rosmantuzumab | QVQLVQSGAEVKKPGASV | DIQMTQSPSSLSASVGD | na | na |
| (Format: Whole | KVSCKASGYTFTDYSIHWV | RVTITCKASQSVDYDGDS | | |
| mAb) | RQAPGQGLEWIGYIYPSN | YMNWYQQKPGKAPKLLI | | |
| | GDSGYNQKFKNRVTMTR | YAASNLESGVPSRFSGSG | | |
| | DTSTSTAYMELSRLRSEDT | SGTDFTLTISPVQAEDFA | | |
| | AVYYCATYFANNFDYWG | TYYCQQSNEDPLTFGAG | | |
| | QGTTLTVSS (SEQ ID NO: | TKLELK (SEQ ID NO: | | |
| | 760) | 761) | | |
| Rovalpituzumab | QVQLVQSGAEVKKPGASV | EIVMTQSPATLSVSPGER | na | na |
| (Format: Whole | KVSCKASGYTFTNYGMN | ATLSCKASQSVSNDVVW | | |
| mAb ADC) | WVRQAPGQGLEWMGWI | YQQKPGQAPRLLIYYASN | | |
| | NTYTGEPTYADDFKGRVT | RYTGIPARFSGSGSGTEFT | | |
| | MTTDTSTSTAYMELRSLRS | LTISSLQSEDFAVYYCQQ | | |
| | DDTAVYYCARIGDSSPSDY | DYTSPWTFGQGTKLEIK | | |
| | WGQGTLVTVSS (SEQ ID | (SEQ ID NO: 763) | | |
| | NO: 762) | | | |
| Rozanolixizumab | EVPLVESGGGLVQPGGSL | DIQMTQSPSSLSASVGD | na | na |
| (Format: Whole | RLSCAVSGFTFSNYGMVW | RVTITCKSSQSLVGASGK | | |
| mAb) | VRQAPGKGLEWVAYIDSD | TYLYWLFQKPGKAPKRLI | | |
| | GDNTYYRDSVKGRFTISRD | YLVSTLDSGIPSRFSGSGS | | |
| | NAKSSLYLQMNSLRAEDT | GTEFTLTISSLQPEDFATY | | |
| | AVYYCTTGIVRPFLYWGQ | YCLQGTHFPHTFGQGTK | | |
| | GTLVTVSS (SEQ ID NO: | LEIK (SEQ ID NO: 765) | | |
| | 764) | | | |
| Rozipafusp | EVQLVESGGGLVQPGGSL | DIQMTQSPSSLSASVGD | na | na |
| (Format: Whole | RLSCAASGFTFSSYWMSW | RVTITCRASQGISNWLA | | |
| mAb Fusion) | VRQAPGKGLEWVAYIKQD | WYQQKPEKAPKSLIYAAS | | |
| | GNEKYYVDSVKGRFTISRD | SLQSGVPSRFSGSGSGTD | | |
| | NAKNSLYLQMNSLRAEDT | FTLTISSLQPEDFATYYCQ | | |
| | AVYYCAREGILWFGDLPTF | QYDSYPRTFGQGTKVEIK | | |
| | WGQGTLVTVSS (SEQ ID | (SEQ ID NO: 767) | | |
| | NO: 766) | | | |
| Ruplizumab | QVQLVQSGAEVVKPGASV | DIVLTQSPATLSVSPGER | na | na |
| (Format: Whole | KLSCKASGYIFTSYYMYWV | ATISCRASQRVSSSTYSY | | |
| mAb) | KQAPGQGLEWIGEINPSN | MHWYQQKPGQPPKLLIK | | |
| | GDTNFNEKFKSKATLTVDK | YASNLESGVPARFSGSGS | | |
| | SASTAYMELSSLRSEDTAV | GTDFTLTISSVEPEDFATY | | |
| | YYCTRSDGRNDMDSWG | YCQHSWEIPPTFGGGTKL | | |
| | QGTLVTVSS (SEQ ID NO: | EIK (SEQ ID NO: 769) | | |
| | 768) | | | |
| Sacituzumab | QVQLQQSGSELKKPGASV | DIQLTQSPSSLSASVGDR | na | na |
| (Format: Whole | KVSCKASGYTFTNYGMN | VSITCKASQDVSIAVAWY | | |
| mAb ADC) | WVKQAPGQGLKWMGWI | QQKPGKAPKLLIYSASYR | | |
| | NTYTGEPTYTDDFKGRFAF | YTGVPDRFSGSGSGTDFT | | |
| | SLDTSVSTAYLQISSLKADD | LTISSLQPEDFAVYYCQQ | | |
| | TAVYFCARGGFGSSYWYF | HYITPLTFGAGTKVEIK | | |
| | DVWGQGSLVTVSS (SEQ | (SEQ ID NO: 771) | | |
| | ID NO: 770) | | | |
| Samalizumab | QVQLQQSGSELKKPGASV | DIQMTQSPSSLSASIGDR | na | na |
| (Format: Whole | KISCKASGYSFTDYIILWVR | VTITCKASQDINSYLSWF | | |
| mAb) | QNPGKGLEWIGHIDPYYG | QQKPGKAPKLLIYRANRL | | |
| | SSNYNLKFKGRVTITADQS | VDGVPSRFSGSGSGTDYT | | |
| | TTTAYMELSSLRSEDTAVY | LTISSLQPEDFAVYYCLQY | | |
| | YCGRSKRDYFDYWGQGT | DEFPYTFGGGTKLEIK | | |
| | TLTVSS (SEQ ID NO: 772) | (SEQ ID NO: 773) | | |
| Samrotamab | EVQLVQSGAEVKKPGASV | DIQMTQSPSSLSASVGD | na | na |
| (Format: Whole | KVSCKASGYKFSSYWIEW | RVTITCRASQDISNYLNW | | |
| mAb ADC) | VKQAPGQGLEWIGEILPG | YQQKPGGAVKFLIYYTSR | | |
| | SDTTNYNEKFKDRATFTSD | LHSGVPSRFSGSGSGTDY | | |
| | TSINTAYMELSRLRSDDTA | TLTISSLQPEDFATYFCQQ | | |
| | VYYCARDRGNYRAWFGY | GEALPWTFGGGTKVEIK | | |
| | WGQGTLVTVSS (SEQ ID | (SEQ ID NO: 775) | | |
| | NO: 774) | | | |
| Sarilumab | EVQLVESGGGLVQPGRSL | DIQMTQSPSSVSASVGD | na | na |
| (Format: Whole | RLSCAASRFTFDDYAMH | RVTITCRASQGISSWLAW | | |
| mAb) | WVRQAPGKGLEWVSGIS | YQQKPGKAPKLLIYGASS | | |
| | WNSGRIGYADSVKGRFTIS | LESGVPSRFSGSGSGTDF | | |
| | RDNAENSLFLQMNGLRAE | TLTISSLQPEDFASYYCQQ | | |
| | DTALYYCAKGRDSFDIWG | ANSFPYTFGQGTKLEIK | | |
| | QGTMVTVSS (SEQ ID | (SEQ ID NO: 777) | | |
| | NO: 776) | | | |
| Satralizumab | QVQLQESGPGLVKPSETLS | DIQMTQSPSSLSASVGDS | na | na |
| (Sapelizumab) | LTCAVSGHSISHDHAWSW | VTITCQASTDISSHLNWY | | |
| (Format: Whole | VRQPPGEGLEWIGFISYSG | QQKPGKAPELLIYYGSHL | | |
| mAb) | ITNYNPSLQGRVTISRDNS | LSGVPSRFSGSGSGTDFT | | |
| | KNTLYLQMNSLRAEDTAV | FTISSLEAEDAATYYCGQ | | |
| | YYCARSLARTTAMDYWGE | GNRLPYTFGQGTKVEIE | | |
| | GTLVTVSS (SEQ ID NO: | (SEQ ID NO: 779) | | |
| | 778) | | | |
| Secukinumab | EVQLVESGGGLVQPGGSL | EIVLTQSPGTLSLSPGERA | na | na |
| (Format: Whole | RLSCAASGFTFSNYWMN | TLSCRASQSVSSSYLAWY | | |
| mAb) | WVRQAPGKGLEWVAAIN | QQKPGQAPRLLIYGASSR | | |
| | QDGSEKYYVGSVKGRFTIS | ATGIPDRFSGSGSGTDFT | | |
| | RDNAKNSLYLQMNSLRVE | LTISRLEPEDFAVYYCQQY | | |
| | DTAVYYCVRDYYDILTDYYI | GSSPCTFGQGTRLEIK | | |
| | HYWYFDLWGRGTLVTVSS | (SEQ ID NO: 781) | | |
| | (SEQ ID NO: 780) | | | |
| Selicrelumab | QVQLVQSGAEVKKPGASV | DIQMTQSPSSVSASVGD | na | na |
| (Format: Whole | KVSCKASGYTFTGYYMHW | RVTITCRASQGIYSWLA | | |
| mAb) | VRQAPGQGLEWMGWIN | WYQQKPGKAPNLLIYTA | | |
| | PDSGGTNYAQKFQGRVT | STLQSGVPSRFSGSGSGT | | |
| | MTRDTSISTAYMELNRLRS | DFTLTISSLQPEDFATYYC | | |
| | DDTAVYYCARDQPLGYCT | QQANIFPLTFGGGTKVEI | | |
| | NGVCSYFDYWGQGTLVT | K (SEQ ID NO: 783) | | |
| | VSS (SEQ ID NO: 782) | | | |
| Semorinemab | EVQLVESGGGLVQPGGSL | DDVLTQTPLSLPVTPGQP | na | na |
| (Format: Whole | RLSCAASGLIFRSYGMSW | ASISCRSSQSIVHSNGNTY | | |
| mAb) | VRQAPGKGLEWVATINSG | LEWYLQKPGQSPQLLIYK | | |
| | GTYTYYPDSVKGRFTISRD | VSNRFSGVPDRFSGSGS | | |
| | NSKNTLYLQMNSLRAEDT | GTDFTLKISRVEAEDVGV | | |
| | AVYYCANSYSGAMDYWG | YYCFQGSLVPWTFGQGT | | |
| | QGTLVTVSS (SEQ ID NO: | KVEIK (SEQ ID NO: 785) | | |
| | 784) | | | |
| Seribantumab | EVQLLESGGGLVQPGGSL | QSALTQPASVSGSPGQSI | na | na |
| (Format: Whole | RLSCAASGFTFSHYVMAW | TISCTGTSSDVGSYNVVS | | |
| mAb) | VRQAPGKGLEWVSSISSS | WYQQHPGKAPKLIIYEVS | | |
| | GGWTLYADSVKGRFTISR | QRPSGVSNRFSGSKSGN | | |
| | DNSKNTLYLQMNSLRAED | TASLTISGLQTEDEADYYC | | |
| | TAVYYCTRGLKMATIFDY | CSYAGSSIFVIFGGGTKVT | | |
| | WGQGTLVTVSS (SEQ ID | VL (SEQ ID NO: 787) | | |
| | NO: 786) | | | |
| Setoxaximab | EVQLQQPGPELEKPGASV | DIVLSQSPSSLVVSVGEKV | na | na |
| (Format: Whole | KLSCKASGYSFTDYNMNW | TMSCKSSQSLLYSRNQKN | | |
| mAb) | VKQNNGESLEWIGKIDPY | YLAWYQQKPGQSPKVLI | | |
| | YGGPSYNQKFKDKATLTV | YWASTRESGVPDRLTGS | | |
| | DKSSSTAYMQLKSLTSEDS | GSGTDFTLTISSVKAEDLA | | |
| | AVYYCTRGGNRDWYFDV | VYYCQQYYSYPLTFGAGT | | |
| | WGAGTTLTVSA (SEQ ID | KLELK | | |
| | NO: 788) | (SEQ ID NO: 789) | | |
| Setrusumab | QVQLVESGGGLVQPGGSL | DIALTQPASVSGSPGQSIT | na | na |
| (Format: Whole | RLSCAASGFTFRSHWLSW | ISCTGTSSDVGDINDVSW | | |
| mAb) | VRQAPGKGLEWVSNINYD | YQQHPGKAPKLMIYDVN | | |
| | GSSTYYADSVKGRFTISRD | NRPSGVSNRFSGSKSGN | | |
| | NSKNTLYLQMNSLRAEDT | TASLTISGLQAEDEADYY | | |
| | AVYYCARDTYLHFDYWGQ | CQSYAGSYLSEVFGGGTK | | |
| | GTLVTVSS (SEQ ID NO: | LTVL (SEQ ID NO: 791) | | |
| | 790) | | | |
| Sifalimumab | QVQLVQSGAEVKKPGASV | EIVLTQSPGTLSLSPGERA | na | na |
| (Format: Whole | KVSCKASGYTFTSYSISWV | TLSCRASQSVSSTYLAWY | | |
| mAb) | RQAPGQGLEWMGWISV | QQKPGQAPRLLIYGASSR | | |
| | YNGNTNYAQKFQGRVTM | ATGIPDRFSGSGSGTDFT | | |
| | TTDTSTSTAYLELRSLRSDD | LTISRLEPEDFAVYYCQQY | | |
| | TAVYYCARDPIAAGYWGQ | GSSPRTFGQGTKVEIK | | |
| | GTLVTVSS (SEQ ID NO: | (SEQ ID NO: 793) | | |
| | 792) | | | |
| Siltuximab | EVQLVESGGKLLKPGGSLK | QIVLIQSPAIMSASPGEKV | na | na |
| (Format: Whole | LSCAASGFTFSSFAMSWF | TMTCSASSSVSYMYWYQ | | |
| mAb) | RQSPEKRLEWVAEISSGGS | QKPGSSPRLLIYDTSNLAS | | |
| | YTYYPDTVTGRFTISRDNA | GVPVRFSGSGSGTSYSLTI | | |
| | KNTLYLEMSSLRSEDTAM | SRMEAEDAATYYCQQW | | |
| | YYCARGLWGYYALDYWG | SGYPYTFGGGTKLEIK | | |
| | QGTSVTVSS (SEQ ID NO: | (SEQ ID NO: 795) | | |
| | 794) | | | |
| Simtuzumab | QVQLVQSGAEVKKPGASV | DIVMTQTPLSLSVTPGQP | na | na |
| (Format: Whole | KVSCKASGYAFTYYLIEWV | ASISCRSSKSLLHSNGNTY | | |
| mAb) | RQAPGQGLEWIGVINPGS | LYWFLQKPGQSPQFLIYR | | |
| | GGTNYNEKFKGRATITAD | MSNLASGVPDRFSGSGS | | |
| | KSTSTAYMELSSLRSEDTA | GTDFTLKISRVEAEDVGV | | |
| | VYFCARNWMNFDYWGQ | YYCMQHLEYPYTFGGGT | | |
| | GTTVTVSS (SEQ ID NO: | KVEIK (SEQ ID | | |
| | 796) | NO: 797) | | |
| Sintilimab | QVQLVQSGAEVKKPGSSV | DIQMTQSPSSVSASVGD | na | na |
| (Format: Whole | KVSCKASGGTFSSYAISWV | RVTITCRASQGISSWLAW | | |
| mAb) | RQAPGQGLEWMGLIIPM | YQQKPGKAPKLLISAASSL | | |
| | FDTAGYAQKFQGRVAITV | QSGVPSRFSGSGSGTDFT | | |
| | DESTSTAYMELSSLRSEDT | LTISSLQPEDFATYYCQQ | | |
| | AVYYCARAEHSSTGTFDY | ANHLPFTFGGGTKVEIK | | |
| | WGQGTLVTVSS (SEQ ID | (SEQ ID NO: 799) | | |
| | NO: 798) | | | |
| Sirtratumab | QVQLVESGGGVVQPGRSL | DIVMTQSPLSLPVTPGEP | na | na |
| (Format: Whole | RLSCAASGFTFSSYGMHW | ASISCRSSQSLLLSHGFNY | | |
| mAb ADC) | VRQAPGKGLEWVAVIWY | LDWYLQKPGQSPQLLIYL | | |
| | DGSNQYYADSVKGRFTISR | GSSRASGVPDRFSGSGS | | |
| | DNSKNTLFLQMHSLRAED | GTDFTLKISRVEAEDVGLY | | |
| | TAVYYCARGLTSGRYGMD | YCMQPLQIPWTFGQGTK | | |
| | VWGQGTTVTVSS (SEQ ID | VEIK (SEQ ID NO: 801) | | |
| | NO: 800) | | | |
| Sirukumab | EVQLVESGGGLVQPGGSL | EIVLTQSPATLSLSPGERA | na | na |
| (Format: Whole | RLSCAASGFTFSPFAMSW | TLSCSASISVSYMYWYQQ | | |
| mAb) | VRQAPGKGLEWVAKISPG | KPGQAPRLLIYDMSNLAS | | |
| | GSWTYYSDTVTGRFTISRD | GIPARFSGSGSGTDFTLTI | | |
| | NAKNSLYLQMNSLRAEDT | SSLEPEDFAVYYCMQWS | | |
| | AVYYCARQLWGYYALDIW | GYPYTFGGGTKVEIK | | |
| | GQGTTVTVSS (SEQ ID | (SEQ ID NO: 803) | | |
| | NO: 802) | | | |
| Sofituzumab | EVQLVESGGGLVQPGGSL | DIQMTQSPSSLSASVGD | na | na |
| (Format: Whole | RLSCAASGYSITNDYAWN | RVTITCKASDLIHNWLA | | |
| mAb ADC) | WVRQAPGKGLEWVGYIS | WYQQKPGKAPKLLIYGA | | |
| | YSGYTTYNPSLKSRFTISRD | TSLETGVPSRFSGSGSGT | | |
| | TSKNTLYLQMNSLRAEDT | DFTLTISSLQPEDFATYYC | | |
| | AVYYCARWTSGLDYWGQ | QQYWTTPFTFGQGTKVE | | |
| | GTLVTVSS (SEQ ID NO: | IK (SEQ ID NO: 805) | | |
| | 804) | | | |
| Solanezumab | EVQLVESGGGLVQPGGSL | DVVMTQSPLSLPVTLGQ | na | na |
| (Format: Whole | RLSCAASGFTFSRYSMSW | PASISCRSSQSLIYSDGNA | | |
| mAb) | VRQAPGKGLELVAQINSV | YLHWFLQKPGQSPRLLIY | | |
| | GNSTYYPDTVKGRFTISRD | KVSNRFSGVPDRFSGSGS | | |
| | NAKNTLYLQMNSLRAEDT | GTDFTLKISRVEAEDVGV | | |
| | AVYYCASGDYWGQGTLV | YYCSQSTHVPWTFGQGT | | |
| | TVSS (SEQ ID NO: 806) | KVEIK | | |
| | | (SEQ ID NO: 807) | | |
| Solitomab | EVQLLEQSGAELVRPGTSV | ELVMTQSPSSLTVTAGEK | DVQLVQSGAEVKK | DIVLTQSPATLSLS |
| (Format: | KISCKASGYAFTNYWLGW | VTMSCKSSQSLLNSGNQ | PGASVKVSCKASG | PGERATLSCRASQ |
| Bispecific scFV) | VKQRPGHGLEWIGDIFPG | KNYLTWYQQKPGQPPKL | YTFTRYTMHWVR | SVSYMNWYQQK |
| | SGNIHYNEKFKGKATLTAD | LIYWASTRESGVPDRFTG | QAPGQGLEWIGYI | PGKAPKRWIYDTS |
| | KSSSTAYMQLSSLTFEDSA | SGSGTDFTLTISSVQAEDL | NPSRGYTNYADSV | KVASGVPARFSGS |
| | VYFCARLRNWDEPMDYW | AVYYCQNDYSYPLTFGA | KGRFTITTDKSTST | GSGTDYSLTINSLE |
| | GQGTTVTVSS (SEQ ID | GTKLEIK (SEQ ID NO: | AYMELSSLRSEDTA | AEDAATYYCQQ |
| | NO: 808) | 809) | TYYCARYYDDHYCL | WSSNPLTFGGGT |
| | | | DYWGQGTTVTVSS | KVEIK (SEQ ID |
| | | | (SEQ ID NO: 810) | NO: 811) |
| Spartalizumab | EVQLVQSGAEVKKPGESL | EIVLTQSPATLSLSPGERA | na | na |
| (Format: Whole | RISCKGSGYTFTTYWMH | TLSCKSSQSLLDSGNQKN | | |
| mAb) | WVRQATGQGLEWMGNI | FLTWYQQKPGQAPRLLIY | | |
| | YPGTGGSNFDEKFKNRVTI | WASTRESGVPSRFSGSG | | |
| | TADKSTSTAYMELSSLRSE | SGTDFTFTISSLEAEDAAT | | |
| | DTAVYYCTRWTTGTGAY | YYCQNDYSYPYTFGQGT | | |
| | WGQGTTVTVSS (SEQ ID | KVEIK | | |
| | NO: 812) | (SEQ ID NO: 813) | | |
| Spesolimab | QVQLVQSGAEVKKPGASV | QIVLTQSPGTLSLSPGERA | na | na |
| (Format: Whole | KVSCKASGYSFTSSWIHW | TMTCTASSSVSSSYFHWY | | |
| mAb) | VKQAPGQGLEWMGEINP | QQKPGQAPRLWIYRTSR | | |
| | GNVRTNYNENFRNKVTM | LASGVPDRFSGSGSGTDF | | |
| | TVDTSISTAYMELSRLRSD | TLTISRLEPEDAATYYCHQ | | |
| | DTAVYYCTVVFYGEPYFPY | FHRSPLTFGAGTKLEIK | | |
| | WGQGTLVTVSS (SEQ ID | (SEQ ID NO: 815) | | |
| | NO: 814) | | | |
| Suptavumab | EVQLVESGGDLVQPGRSL | EIVMTQSPATLSVSPGER | na | na |
| (Format: Whole | RLSCVASGFTFDDYAMH | ATLSCRASQTILSNLAWY | | |
| mAb) | WVRQAPGKGLEWVSGVS | LQKPGQAPRLLIYGASTR | | |
| | WSGSTVGYADSVKGRFTV | ATGLPARFSGSGSGTEFT | | |
| | SRDNAQKSLYLQMNSLRA | LTISSLQSEDFAVYYCQQY | | |
| | EDTALYYCVKDAYKFNYYY | NNWPLTFGGGTKVEIK | | |
| | YGLDVWGQGTTVTVSS | (SEQ ID NO: 817) | | |
| | (SEQ ID NO: 816) | | | |
| Sutimlimab | EVQLVESGGGLVKPGGSL | QIVLTQSPATLSLSPGERA | na | na |
| (Format: Whole | RLSCAASGFTFSNYAMSW | TMSCTASSSVSSSYLHWY | | |
| mAb) | VRQAPGKGLEWVATISSG | QQKPGKAPKLWIYSTSNL | | |
| | GSHTYYLDSVKGRFTISRD | ASGVPSRFSGSGSGTDYT | | |
| | NSKNTLYLQMNSLRAEDT | LTISSLQPEDFATYYCHQY | | |
| | ALYYCARLFTGYAMDYW | YRLPPITFGQGTKLEIK | | |
| | GQGTLVTVSS (SEQ ID | (SEQ ID NO: 819) | | |
| | NO: 818) | | | |
| Suvizumab | QVQLVQSGAEVKKPGASV | DIQMTQRPDSLSASVGD | na | na |
| (Format: Whole | KVSCKASGYTFTNSWIGW | RVTMSCKSSQSLLNSGD | | |
| mAb) | FRQAPGQGLEWIGDIYPG | QKNYLTWYQQKPGQPP | | |
| | GGYTNYNEIFKGKATMTA | KLLIYWASTGESGVPDRF | | |
| | DTSTNTAYMELSSLRSEDT | SGSGSGTDFTFTISSLQPE | | |
| | AVYYCSRGIPGYAMDYW | DIATYYCQNDYSYPWTF | | |
| | GQGTLVTVSS (SEQ ID | GQGTKVEIK (SEQ ID | | |
| | NO: 820) | NO: 821) | | |
| Suvratoxumab | EVQLVESGGGLVQPGGSL | DIQMTQSPSTLSASVGD | na | na |
| (Format: Whole | RLSCAASGFTFSSHDMHW | RVTITCRASQSISSWLAW | | |
| mAb) | VRQATGKGLEWVSGIGTA | YQQKPGKAPKLLIYKASSL | | |
| | GDTYYPDSVKGRFTISREN | ESGVPSRFSGSGSGTEFT | | |
| | AKNSLYLQMNSLRAGDTA | LTISSLQPDDFATYYCKQY | | |
| | VYYCARDRYSPTGHYYGM | ADYWTFGQGTKVEIK | | |
| | DVWGQGTTVTVSS (SEQ | (SEQ ID NO: 823) | | |
| | ID NO: 822) | | | |
| Tabalumab | QVQLQQWGAGLLKPSETL | EIVLTQSPATLSLSPGERA | na | na |
| (Format: Whole | SLTCAVYGGSFSGYYWSW | TLSCRASQSVSRYLAWYQ | | |
| mAb) | IRQPPGKGLEWIGEINHSG | QKPGQAPRLLIYDASNRA | | |
| | STNYNPSLKSRVTISVDTSK | TGIPARFSGSGSGTDSTLT | | |
| | NQFSLKLSSVTAADTAVYY | ISSLEPEDFAVYYCQQRS | | |
| | CARGYYDILTGYYYYFDYW | NWPRTFGQGTKVEIK | | |
| | GQGTLVTVSS (SEQ ID | (SEQ ID NO: 825) | | |
| | NO: 824) | | | |
| Tabituximab | EVQLQQSGAELVKPGASV | DIQMTQSPASLSVSVGET | na | na |
| (Format: Whole | KLSCTASGFNINDTYMHW | VTITCRASENIYSNLAWY | | |
| mAb ADC) | VKQRPEQGLEWIGRIDPA | QQKQGKSPQLLVYVATN | | |
| | NGNTKYDPKFQGKATITA | LADGVPSRFSGSGSGTQY | | |
| | DTSSNTAYLQLSSLTSEDT | SLKINSLQSEDFGSYYCQ | | |
| | AVYYCARGARGSRFAYW | HFWGTPYTFGGGTKLEIK | | |
| | GQGTLVTVSA (SEQ ID | (SEQ ID NO: 827) | | |
| | NO: 826) | | | |
| Tadocizumab | QVQLVQSGAEVKKPGSSV | DIQMTQTPSTLSASVGD | na | na |
| (Format: Fab) | KVSCKASGYAFTNYLIEWV | RVTISCRASQDINNYLNW | | |
| | RQAPGQGLEWIGVIYPGS | YQQKPGKAPKLLIYYTSTL | | |
| | GGTNYNEKFKGRVTLTVD | HSGVPSRFSGSGSGTDYT | | |
| | ESTNTAYMELSSLRSEDTA | LTISSLQPDDFATYFCQQ | | |
| | VYFCARRDGNYGWFAYW | GNTLPWTFGQGTKVEVK | | |
| | GQGTLVTVSS (SEQ ID | (SEQ ID NO: 829) | | |
| | NO: 828) | | | |
| Tafasitamab | EVQLVESGGGLVKPGGSL | DIVMTQSPATLSLSPGER | na | na |
| (Format: Whole | KLSCAASGYTFTSYVMHW | ATLSCRSSKSLQNVNGNT | | |
| mAb) | VRQAPGKGLEWIGYINPY | YLYWFQQKPGQSPQLLIY | | |
| | NDGTKYNEKFQGRVTISS | RMSNLNSGVPDRFSGSG | | |
| | DKSISTAYMELSSLRSEDTA | SGTEFTLTISSLEPEDFAVY | | |
| | MYYCARGTYYYGTRVFDY | YCMQHLEYPITFGAGTKL | | |
| | WGQGTLVTVSS (SEQ ID | EIK (SEQ ID NO: 831) | | |
| | NO: 830) | | | |
| Talacotuzumab | EVQLVQSGAEVKKPGESL | DIVMTQSPDSLAVSLGER | na | na |
| (Format: Whole | KISCKGSGYSFTDYYMKW | ATINCESSQSLLNSGNQK | | |
| mAb) | ARQMPGKGLEWMGDIIP | NYLTWYQQKPGQPPKPL | | |
| | SNGATFYNQKFKGQVTIS | IYWASTRESGVPDRFSGS | | |
| | ADKSISTTYLQWSSLKASD | GSGTDFTLTISSLQAEDV | | |
| | TAMYYCARSHLLRASWFA | AVYYCQNDYSYPYTFGQ | | |
| | YWGQGTMVTVSS (SEQ | GTKLEIK (SEQ ID NO: | | |
| | ID NO: 832) | 833) | | |
| Tamrintamab | QVQLVQSGAEVKKPGSSV | EIVLTQSPATLSLSPGERA | na | na |
| (Format: Whole | KVSCKASGGTFSSYWIEW | TLSCTASSSVNSFYLHWY | | |
| mAb ADC) | VRQAPGQGLEWMGEILP | QQKPGLAPRLLIYSTSNLA | | |
| | GSGNTYYNERFKDRVTITA | SGIPDRFSGSGSGTDFTLT | | |
| | DESTSTAYMELSSLRSEDT | ISRLEPEDFAVYYCHQYH | | |
| | AVYYCARRAAAYYSNPEW | RSPYTFGQGTKLEIK | | |
| | FAYWGQGTLVTVSS (SEQ | (SEQ ID NO: 835) | | |
| | ID NO: 834) | | | |
| Tamtuvetmab | EVKLLESGGGLVQPGGSM | DIKMTQSPSFLSASVGDR | na | na |
| (Format: Canine | RLSCAGSGFTFTDFYMNW | VTLNCKASQNIDKYLNW | | |
| Whole mAb) | IRQPAGKAPEWLGFIRDK | YQQKLGESPKLLIYNTNN | | |
| | AKGYTTEYNPSVKGRFTIS | LQTGIPSRFSGSGSGTDF | | |
| | RDNTQNMLYLQMNTLRA | TLTISSLQPEDVATYFCLQ | | |
| | EDTATYYCAREGHTAAPF | HISRPRTFGGGTHLTVL | | |
| | DYWGQGTLVTVSS (SEQ | (SEQ ID NO: 837) | | |
| | ID NO: 836) | | | |
| Tanezumab | QVQLQESGPGLVKPSETLS | DIQMTQSPSSLSASVGD | na | na |
| (Format: Whole | LTCTVSGFSLIGYDLNWIR | RVTITCRASQSISNNLNW | | |
| mAb) | QPPGKGLEWIGIIWGDGT | YQQKPGKAPKLLIYYTSRF | | |
| | TDYNSAVKSRVTISKDTSK | HSGVPSRFSGSGSGTDFT | | |
| | NQFSLKLSSVTAADTAVYY | FTISSLQPEDIATYYCQQE | | |
| | CARGGYWYATSYYFDYW | HTLPYTFGQGTKLEIK | | |
| | GQGTLVTVSS (SEQ ID | (SEQ ID NO: 839) | | |
| | NO: 838) | | | |
| Tarextumab | EVQLVESGGGLVQPGGSL | DIVLTQSPATLSLSPGERA | na | na |
| (Format: Whole | RLSCAASGFTFSSSGMSW | TLSCRASQSVRSNYLAWY | | |
| mAb) | VRQAPGKGLEWVSVIASS | QQKPGQAPRLLIYGASSR | | |
| | GSNTYYADSVKGRFTISRD | ATGVPARFSGSGSGTDFT | | |
| | NSKNTLYLQMNSLRAEDT | LTISSLEPEDFAVYYCQQY | | |
| | AVYYCARSIFYTTWGQGTL | SNFPITFGQGTKVEIK | | |
| | VTVSS (SEQ ID NO: 840) | (SEQ ID NO: 841) | | |
| Tavolimab | QVQLQESGPGLVKPSQTL | DIQMTQSPSSLSASVGD | na | na |
| (Tavolixizumab) | SLTCAVYGGSFSSGYWN | RVTITCRASQDISNYLNW | | |
| (Format: Whole | WIRKHPGKGLEYIGYISYN | YQQKPGKAPKLLIYYTSKL | | |
| mAb) | GITYHNPSLKSRITINRDTS | HSGVPSRFSGSGSGTDYT | | |
| | KNQYSLQLNSVTPEDTAV | LTISSLQPEDFATYYCQQ | | |
| | YYCARYKYDYDGGHAMD | GSALPWTFGQGTKVEIK | | |
| | YWGQGTLVTVSS (SEQ ID | (SEQ ID NO: 843) | | |
| | NO: 842) | | | |
| Tebentafusp | EVQLVESGGGLVQPGGSL | AIQMTQSPSSLSASVGDR | na | na |
| (Format: scFv | RLSCAASGYSFTGYTMNW | VTITCRASQDIRNYLNWY | | |
| Fusion) | VRQAPGKGLEWVALINPY | QQKPGKAPKLLIYYTSRLE | | |
| | KGVSTYNQKFKDRFTISVD | SGVPSRFSGSGSGTDYTL | | |
| | KSKNTAYLQMNSLRAEDT | TISSLQPEDFATYYCQQG | | |
| | AVYYCARSGYYGDSDWYF | NTLPWTFGQGTKVEIK | | |
| | DVWGQGTLVTVSS (SEQ | (SEQ ID NO: 845) | | |
| | ID NO: 844) | | | |
| Teclistamab | QLQLQESGPGLVKPSETLS | SYVLTQPPSVSVAPGQTA | EVQLVESGGGLVQ | QTVVTQEPSLTVS |
| (Format: | LTCTVSGGSISSGSYFWG | RITCGGNNIGSKSVHWY | PGGSLRLSCAASGF | PGGTVTLTCRSST |
| Bispecific mAb) | WIRQPPGKGLEWIGSIYYS | QQPPGQAPVVVVYDDS | TFNTYAMNWVRQ | GAVTTSNYANW |
| | GITYYNPSLKSRVTISVDTS | DRPSGIPERFSGSNSGNT | APGKGLEWVARIR | VQQKPGQAPRGL |
| | KNQFSLKLSSVTAADTAVY | ATLTISRVEAGDEAVYYC | SKYNNYATYYAASV | IGGTNKRAPGTPA |
| | YCARHDGAVAGLFDYWG | QVWDSSSDHVVFGGGT | KGRFTISRDDSKNS | RFSGSLLGGKAAL |
| | QGTLVTVSS (SEQ ID NO: | KLTVL | LYLQMNSLKTEDT | TLSGVQPEDEAEY |
| | 846) | (SEQ ID NO: 847) | AVYYCARHGNFGN | YCALWYSNLWVF |
| | | | SYVSWFAYWGQG | GGGTKLTVL (SEQ |
| | | | TLVTVSS (SEQ ID | ID NO: 849) |
| | | | NO: 848) | |
| Telisotuzumab | QVQLVQSGAEVKKPGASV | DIVMTQSPDSLAVSLGER | na | na |
| (Format: Whole | KVSCKASGYIFTAYTMHW | ATINCKSSESVDSYANSFL | | |
| mAb ADC) | VRQAPGQGLEWMGWIK | HWYQQKPGQPPKLLIYR | | |
| | PNNGLANYAQKFQGRVT | ASTRESGVPDRFSGSGSG | | |
| | MTRDTSISTAYMELSRLRS | TDFTLTISSLQAEDVAVYY | | |
| | DDTAVYYCARSEITTEFDY | CQQSKEDPLTFGGGTKV | | |
| | WGQGTLVTVSS (SEQ ID | EIK (SEQ ID NO: 851) | | |
| | NO: 850) | | | |
| Temelimab | QVQLVQSGAEVKKPGSSV | QIQLTQSPSSLSASVGDR | na | na |
| (Format: Whole | KVSCKASGYTFTDYEMHW | VTITCSASSSVSYMYWYQ | | |
| mAb) | VRQAPGQGLEWIGAVAP | QKPGKAPKAWIYRTSNL | | |
| | ETGGTAYNQKFKGRATITA | ASGVPSRFSGSGSGTDYT | | |
| | DKSTSTAYMELSSLRSEDT | LTISSLQPEDFATYYCQQY | | |
| | AVYYCTSTVVPFAYWGQG | QSLPLTFGGGTKVEIK | | |
| | TLVTVSS (SEQ ID NO: | (SEQ ID NO: 853) | | |
| | 852) | | | |
| Tenatumomab | EIQLQQSGPELVKPGASVK | DIVMTQAAPSVPVTPGE | na | na |
| (Format: Whole | VSCKASGYAFTSYNMYWV | SVSISCRSSKSLLHSNGNT | | |
| mAb | KQSHGKSLEWIGYIDPYN | YLYWFLQRPGQSPQLLIY | | |
| Radiolabelled) | GVTSYNQKFKGKATLTVD | RMSNLASGVPDRFSGSG | | |
| | KSSSTAYMHLNSLTSEDSA | SGTAFTLRISRVEAEDVG | | |
| | VYYCARGGGSIYYAMDY | VYYCMQHLEYPLTFGAG | | |
| | WGQGTSVTVSS (SEQ ID | TKLELK (SEQ ID NO: | | |
| | NO: 854) | 855) | | |
| Teplizumab | QVQLVQSGGGVVQPGRS | DIQMTQSPSSLSASVGD | na | na |
| (Format: Whole | LRLSCKASGYTFTRYTMH | RVTITCSASSSVSYMNWY | | |
| mAb) | WVRQAPGKGLEWIGYINP | QQTPGKAPKRWIYDTSK | | |
| | SRGYTNYNQKVKDRFTISR | LASGVPSRFSGSGSGTDY | | |
| | DNSKNTAFLQMDSLRPED | TFTISSLQPEDIATYYCQQ | | |
| | TGVYFCARYYDDHYCLDY | WSSNPFTFGQGTKLQIT | | |
| | WGQGTPVTVSS (SEQ ID | (SEQ ID NO: 857) | | |
| | NO: 856) | | | |
| Tepoditamab | QVQLVQSGAEVKKPGASV | DIQMTQSPSSLSASVGD | QVQLVQSGGGVV | DIQMTQSPSSLSA |
| (Format: | KVSCKASGYTFTSYYMHW | RVTITCRASQSISSYLNWY | QPGRSLRLSCVASG | SVGDRVTITCRAS |
| Bispecific mAb) | VRQAPGQGLEWMGIINP | QQKPGKAPKLLIYAASSL | FTFSSYGMHWVR | QSISSYLNWYQQ |
| | SGGSTSYAQKFQGRVTMT | QSGVPSRFSGSGSGTDFT | QAPGKGLEWVAAI | KPGKAPKLLIYAAS |
| | RDTSTSTVYMELSSLRSED | LTISSLQPEDFATYYCQQS | WYNARKQDYADS | SLQSGVPSRFSGS |
| | TAVYYCAKGTTGDWFDY | YSTPPTFGQGTKVEIK | VKGRFTISRDNSKN | GSGTDFTLTISSLQ |
| | WGQGTLVTVSS (SEQ ID | (SEQ ID NO: 859) | TLYLQMNSLRAED | PEDFATYYCQQSY |
| | NO: 858) | | TAVYYCTRGTGYN | STPPTFGQGTKVE |
| | | | WFDPWGQGTLVT | IK (SEQ ID NO: |
| | | | VSS (SEQ ID NO: | 861) |
| | | | 860) | |
| Teprotumumab | QVELVESGGGVVQPGRS | EIVLTQSPATLSLSPGERA | na | na |
| (Format: Whole | QRLSCAASGFTFSSYGMH | TLSCRASQSVSSYLAWYQ | | |
| mAb) | WVRQAPGKGLEWVAIIW | QKPGQAPRLLIYDASKRA | | |
| | FDGSSTYYADSVRGRFTIS | TGIPARFSGSGSGTDFTLT | | |
| | RDNSKNTLYLQMNSLRAE | ISSLEPEDFAVYYCQQRSK | | |
| | DTAVYFCARELGRRYFDL | WPPWTFGQGTKVESK | | |
| | WGRGTLVSVSS (SEQ ID | (SEQ ID NO: 863) | | |
| | NO: 862) | | | |
| Tesidolumab | EVQLVQSGAEVKKPGSSV | SYELTQPLSVSVALGQTA | na | na |
| (Format: Whole | KVSCKASGGTFSSYAISWV | RITCSGDSIPNYYVYWYQ | | |
| mAb) | RQAPGQGLEWMGGIGPF | QKPGQAPVLVIYDDSNR | | |
| | FGTANYAQKFQGRVTITA | PSGIPERFSGSNSGNTAT | | |
| | DESTSTAYMELSSLRSEDT | LTISRAQAGDEADYYCQS | | |
| | AVYYCARDTPYFDYWGQ | FDSSLNAEVFGGGTKLTV | | |
| | GTLVTVSS (SEQ ID NO: | L (SEQ ID NO: 865) | | |
| | 864) | | | |
| Tezepelumab | QMQLVESGGGVVQPGRS | SYVLTQPPSVSVAPGQTA | na | na |
| (Format: Whole | LRLSCAASGFTFRTYGMH | RITCGGNNLGSKSVHWY | | |
| mAb) | WVRQAPGKGLEWVAVI | QQKPGQAPVLVVYDDSD | | |
| | WYDGSNKHYADSVKGRF | RPSWIPERFSGSNSGNTA | | |
| | TITRDNSKNTLNLQMNSL | TLTISRGEAGDEADYYCQ | | |
| | RAEDTAVYYCARAPQWEL | VWDSSSDHVVFGGGTKL | | |
| | VHEAFDIWGQGTMVTVS | TVL (SEQ ID NO: 867) | | |
| | S (SEQ ID NO: 866) | | | |
| Tibulizumab | QVQLQQWGAGLLKPSETL | EIVLTQSPATLSLSPGERA | QVQLVQSGAEVKK | DIVMTQTPLSLSV |
| (Format: | SLTCAVYGGSFSGYYWSW | TLSCRASQSVSRYLAWYQ | PGSSVKVSCKASGY | TPGQPASISCRSS |
| Bispecific Mixed | IRQPPGKGLEWIGEINHSG | QKPGQAPRLLIYDASNRA | KFTDYHIHWVRQA | RSLVHSRGETYLH |
| mAb and scFV) | STNYNPSLKSRVTISVDTSK | TGIPARFSGSGSGTDSTLT | PGQCLEWMGVIN | WYLQKPGQSPQL |
| | NQFSLKLSSVTAADTAVYY | ISSLEPEDFAVYYCQQRS | PTYGTTDYNQRFK | LIYKVSNRFIGVPD |
| | CARGYYDILTGYYYYFDYW | NWPRTFGQGTKVEIK | GRVTITADESTSTA | RFSGSGSGTDFTL |
| | GQGTLVTVSS (SEQ ID | (SEQ ID NO: 869) | YMELSSLRSEDTAV | KISRVEAEDVGVY |
| | NO: 868) | | YYCARYDYFTGTG | YCSQSTHLPFTFG |
| | | | VYWGQGTLVTVSS | CGTKLEIK (SEQ |
| | | | (SEQ ID NO: 870) | ID NO: 871) |
| Tidutamab | EVQLVESGGGLVQPGGSL | DIVMTQSPDSLAVSLGER | EVQLVESGGGLVQ | QAVVTQEPSLTVS |
| (Format: | RLSCAASGFTFSDYGMAW | ATINCKSSQSLLNSRNRK | PGGSLRLSCAASGF | PGGTVTLTCGSST |
| Bispecific Mixed | FRQAPGKGLEWVSFISNL | NYLAWYQQKPDQSPKLL | TFSTYAMNWVRQ | GAVTTSNYANW |
| mAb and scFV) | GYSIYYADSVKGRFTISRD | IYWASTRESGVPDRFSGS | APGKGLEWVGRIR | VQQKPGKSPRGLI |
| | NAKNSLYLQMNSLRAEDT | GSGTDFTLTISSLQAEDV | SKYNNYATYYADS | GGTNKRAPGVPA |
| | AVYYCARAPYDYDSFDPM | AVYYCKQSYYLWTFGGG | VKGRFTISRDDSKN | RFSGSLLGGKAAL |
| | DYWGQGTLVTVSS (SEQ | TKVEIK (SEQ ID NO: | TLYLQMNSLRAED | TISGAQPEDEADY |
| | ID NO: 872) | 873) | TAVYYCVRHGNFG | YCALWYSNHWV |
| | | | DSYVSWFAYWGQ | FGGGTKLTVL |
| | | | GTLVTVSS (SEQ ID | (SEQ ID |
| | | | NO: 874) | NO: 875) |
| Tigatuzumab | EVQLVESGGGLVQPGGSL | DIQMTQSPSSLSASVGD | na | na |
| (Format: Whole | RLSCAASGFTFSSYVMSW | RVTITCKASQDVGTAVA | | |
| mAb) | VRQAPGKGLEWVATISSG | WYQQKPGKAPKLLIYWA | | |
| | GSYTYYPDSVKGRFTISRD | STRHTGVPSRFSGSGSGT | | |
| | NAKNTLYLQMNSLRAEDT | DFTLTISSLQPEDFATYYC | | |
| | AVYYCARRGDSMITTDYW | QQYSSYRTFGQGTKVEIK | | |
| | GQGTLVTVSS (SEQ ID | (SEQ ID NO: 877) | | |
| | NO: 876) | | | |
| Tilavonemab | EVKVVESGGGLVQPGGS | DIVLTQSPDSLAVSLGER | na | na |
| (Format: Whole | MKLSCVVSGFTFSNYWVN | ATISCRASQSVSTSRYSYI | | |
| mAb) | WVRQAPGKGLEWVAQIR | HWYQQKPGQPPKLLIKY | | |
| | LKSDNYATHYEESVKGRFT | ASNLESGVPSRFGSGSGT | | |
| | ISRDDSKSSVYLQMNNLR | DFTLNIHPLEPEDFATYYC | | |
| | AEDSGIYYCTNWEDYWG | HHSWEIPLTFGQGTKLEI | | |
| | QGTTVTVSS (SEQ ID NO: | K (SEQ ID NO: 879) | | |
| | 878) | | | |
| Tildrakizumab | QVQLVQSGAEVKKPGASV | DIQMTQSPSSLSASVGD | na | na |
| (Format: Whole | KVSCKASGYIFITYWMTW | RVTITCRTSENIYSYLAWY | | |
| mAb) | VRQAPGQGLEWMGQIFP | QQKPGKAPKLLIYNAKTL | | |
| | ASGSADYNEKFEGRVTMT | AEGVPSRFSGSGSGTDFT | | |
| | TDTSTSTAYMELRSLRSDD | LTISSLQPEDFATYYCQH | | |
| | TAVYYCARGGGGFAYWG | HYGIPFTFGQGTKVEIK | | |
| | QGTLVTVSS (SEQ ID NO: | (SEQ ID NO: 881) | | |
| | 880) | | | |
| Timolumab | QVQLVESGGGVVQPGRSL | VIQLTQSPSSLSASVGDR | na | na |
| (Format: Whole | RLSCAASGFTFFSYAMHW | VTITCRASQGISRALAWY | | |
| mAb) | VRQTPGKGLEWVAVIWF | QQKPGKGPKLLIYDASSL | | |
| | DGSNENYVDSVKGRFTISR | ESGVPSRFSGSGSGTDFT | | |
| | DNSKNTLYLQMNTLRAED | LTISSLQPEDFATYYCQQF | | |
| | TAVYYCARDAWSYFDYW | NSYPLTFGGGTKVEIK | | |
| | GQGTLVTVSS (SEQ ID | (SEQ ID NO: 883) | | |
| | NO: 882) | | | |
| Tiragolumab | EVQLQQSGPGLVKPSQTL | DIVMTQSPDSLAVSLGER | na | na |
| (Format: Whole | SLTCAISGDSVSSNSAAW | ATINCKSSQTVLYSSNNK | | |
| mAb) | NWIRQSPSRGLEWLGKTY | KYLAWYQQKPGQPPNLL | | |
| | YRFKWYSDYAVSVKGRITI | IYWASTRESGVPDRFSGS | | |
| | NPDTSKNQFSLQLNSVTPE | GSGTDFTLTISSLQAEDV | | |
| | DTAVFYCTRESTTYDLLAG | AVYYCQQYYSTPFTFGPG | | |
| | PFDYWGQGTLVTVSS | TKVEIK (SEQ ID NO: | | |
| | (SEQ ID NO: 884) | 885) | | |
| Tislelizumab | QVQLQESGPGLVKPSETLS | DIVMTQSPDSLAVSLGER | na | na |
| (Format: Whole | LTCTVSGFSLTSYGVHWIR | ATINCKSSESVSNDVAWY | | |
| mAb) | QPPGKGLEWIGVIYADGS | QQKPGQPPKLLINYAFHR | | |
| | TNYNPSLKSRVTISKDTSK | FTGVPDRFSGSGYGTDFT | | |
| | NQVSLKLSSVTAADTAVYY | LTISSLQAEDVAVYYCHQ | | |
| | CARAYGNYWYIDVWGQG | AYSSPYTFGQGTKLEIK | | |
| | TTVTVSS (SEQ ID NO: | (SEQ ID NO: 887) | | |
| | 886) | | | |
| Tisotumab | EVQLLESGGGLVQPGGSL | DIQMTQSPPSLSASAGD | na | na |
| (Format: Whole | RLSCAASGFTFSNYAMSW | RVTITCRASQGISSRLAW | | |
| mAb) | VRQAPGKGLEWVSSISGS | YQQKPEKAPKSLIYAASSL | | |
| | GDYTYYTDSVKGRFTISRD | QSGVPSRFSGSGSGTDFT | | |
| | NSKNTLYLQMNSLRAEDT | LTISSLQPEDFATYYCQQY | | |
| | AVYYCARSPWGYYLDSW | NSYPYTFGQGTKLEIK | | |
| | GQGTLVTVSS (SEQ ID | (SEQ ID NO: 889) | | |
| | NO: 888) | | | |
| Tocilizumab | QVQLQESGPGLVRPSQTL | DIQMTQSPSSLSASVGD | na | na |
| (Format: Whole | SLTCTVSGYSITSDHAWS | RVTITCRASQDISSYLNW | | |
| mAb) | WVRQPPGRGLEWIGYISY | YQQKPGKAPKLLIYYTSRL | | |
| | SGITTYNPSLKSRVTMLRD | HSGVPSRFSGSGSGTDFT | | |
| | TSKNQFSLRLSSVTAADTA | FTISSLQPEDIATYYCQQG | | |
| | VYYCARSLARTTAMDYW | NTLPYTFGQGTKVEIK | | |
| | GQGSLVTVSS (SEQ ID | (SEQ ID NO: 891) | | |
| | NO: 890) | | | |
| Tomaralimab | EVQLVQSGSELKKPGASVK | DIVLTQSPATLSLSPGERA | na | na |
| (Format: Whole | LSCKASGFTFTTYGINWVR | TLSCRASESVEYYGTSLM | | |
| mAb) | QAPGQGLEWIGWIYPRD | QWYQQKPGQPPKLLIFG | | |
| | GSTNFNENFKDRATITVDT | ASNVESGVPDRFSGSGS | | |
| | SASTAYMELSSLRSEDTAV | GTDFTLKISRVEAEDVGM | | |
| | YFCARLTGGTFLDYWGQG | YFCQQSRKLPWTFGGGT | | |
| | TTVTVSS (SEQ ID NO: | KVEIK | | |
| | 892) | (SEQ ID NO: 893) | | |
| Tomuzotuximab | QVQLKQSGPGLVQPSQSL | DILLTQSPVILSVSPGERV | na | na |
| (Format: Whole | SITCTVSGFSLTNYGVHWV | SFSCRASQSIGTNIHWYQ | | |
| mAb) | RQSPGKGLEWLGVIWSG | QRTNGSPRLLIKYASESIS | | |
| | GNTDYNTPFTSRLSINKDN | GIPSRFSGSGSGTDFTLSI | | |
| | SKSQVFFKMNSLQSNDTA | NSVESEDIADYYCQQNN | | |
| | IYYCARALTYYDYEFAYWG | NWPTTFGAGTKLELK | | |
| | QGTLVTVST (SEQ ID NO: | (SEQ ID NO: 895) | | |
| | 894) | | | |
| Toripalimab | QGQLVQSGAEVKKPGASV | DVVMTQSPLSLPVTLGQ | na | na |
| (Format: Whole | KVSCKASGYTFTDYEMHW | PASISCRSSQSIVHSNGNT | | |
| mAb) | VRQAPIHGLEWIGVIESET | YLEWYLQKPGQSPQLLIY | | |
| | GGTAYNQKFKGRVTITAD | KVSNRFSGVPDRFSGSGS | | |
| | KSTSTAYMELSSLRSEDTA | GTDFTLKISRVEAEDVGV | | |
| | VYYCAREGITTVATTYYWY | YYCFQGSHVPLTFGQGT | | |
| | FDVWGQGTTVTVSS (SEQ | KLEIK | | |
| | ID NO: 896) | (SEQ ID NO: 897) | | |
| Tosatoxumab | EVQMVQSGAEVKKPGEPL | QSVLTQSPSASGTPGQR | na | na |
| (Format: Whole | KISCKGSGYKFGTHWIGW | VTISCSGGSSNIGSNTVN | | |
| mAb) | VRQRPGKGLEWMGIIHPA | WYQQFPGAAPKLLIYTN | | |
| | DSETKYSPSFQGQVSFSAD | NQRPSGVPDRFSGSKSG | | |
| | KSSNTAYLHWSTLRASDT | TSASLAISGLQSEDEADYY | | |
| | AMYYCARRSGSSSWYALD | CATWDDSLNGLYVFGTG | | |
| | FWGQGTMVTVSS (SEQ | TKVTVL (SEQ ID NO: | | |
| | ID NO: 898) | 899) | | |
| Tovetumab | QVQLVESGGGLVKPGGSL | DIQMTQSPSSLSASVGD | na | na |
| (Format: Whole | RLSCAASGFTFSDYYMNW | RVSITCRPSQSFSRYINWY | | |
| mAb) | IRQAPGKGLEWVSYISSSG | QQKPGKAPKLLIHAASSL | | |
| | SIIYYADSVKGRFTISRDNA | VGGVPSRFSGSGSGTDFT | | |
| | KNSLYLQMNSLRAEDTAV | LTISSLQPEDFATYYCQQT | | |
| | YYCAREGRIAARGMDVW | YSNPPITFGQGTRLEMK | | |
| | GQGTTVTVSS (SEQ ID | (SEQ ID NO: 901) | | |
| | NO: 900) | | | |
| Tralokinumab | QVQLVQSGAEVKKPGASV | SYVLTQPPSVSVAPGKTA | na | na |
| (Format: Whole | KVSCKASGYTFTNYGLSW | RITCGGNIIGSKLVHWYQ | | |
| mAb) | VRQAPGQGLEWMGWIS | QKPGQAPVLVIYDDGDR | | |
| | ANNGDTNYGQEFQGRVT | PSGIPERFSGSNSGNTAT | | |
| | MTTDTSTSTAYMELRSLRS | LTISRVEAGDEADYYCQV | | |
| | DDTAVYYCARDSSSSWAR | WDTGSDPVVFGGGTKLT | | |
| | WFFDLWGRGTLVTVSS | VL (SEQ ID NO: 903) | | |
| | (SEQ ID NO: 902) | | | |
| Trastuzumab | EVQLVESGGGLVQPGGSL | DIQMTQSPSSLSASVGD | na | na |
| (Timigutuzumab) | RLSCAASGFNIKDTYIHWV | RVTITCRASQDVNTAVA | | |
| (Format: Whole | RQAPGKGLEWVARIYPTN | WYQQKPGKAPKLLIYSAS | | |
| mAb) | GYTRYADSVKGRFTISADT | FLYSGVPSRFSGSRSGTD | | |
| | SKNTAYLQMNSLRAEDTA | FTLTISSLQPEDFATYYCQ | | |
| | VYYCSRWGGDGFYAMDY | QHYTTPPTFGQGTKVEIK | | |
| | WGQGTLVTVSS (SEQ ID | (SEQ ID NO: 905) | | |
| | NO: 904) | | | |
| Tregalizumab | EEQLVESGGGLVKPGGSL | DIVMTQSPDSLAVSLGER | na | na |
| (Format: Whole | RLSCAASGFSFSDCRMYW | ATINCRASKSVSTSGYSYI | | |
| mAb) | LRQAPGKGLEWIGVISVKS | YWYQQKPGQPPKLLIYLA | | |
| | ENYGANYAESVRGRFTISR | SILESGVPDRFSGSGSGT | | |
| | DDSKNTVYLQMNSLKTED | DFTLTISSLQAEDVAVYYC | | |
| | TAVYYCSASYYRYDVGAW | QHSRELPWTFGQGTKVE | | |
| | FAYWGQGTLVTVSS (SEQ | IK (SEQ ID NO: 907) | | |
| | ID NO: 906) | | | |
| Tremelimumab | QVQLVESGGGVVQPGRSL | DIQMTQSPSSLSASVGD | na | na |
| (Ticilimumab) | RLSCAASGFTFSSYGMHW | RVTITCRASQSINSYLDW | | |
| (Format: Whole | VRQAPGKGLEWVAVIWY | YQQKPGKAPKLLIYAASSL | | |
| mAb) | DGSNKYYADSVKGRFTISR | QSGVPSRFSGSGSGTDFT | | |
| | DNSKNTLYLQMNSLRAED | LTISSLQPEDFATYYCQQY | | |
| | TAVYYCARDPRGATLYYYY | YSTPFTFGPGTKVEIK | | |
| | YGMDVWGQGTTVTVSS | (SEQ ID NO: 909) | | |
| | (SEQ ID NO: 908) | | | |
| Trevogrumab | EVQVLESGGDLVQPGGSL | DIQMTQSPASLSASVGD | na | na |
| (Format: Whole | RLSCAASGFTFSAYAMTW | RVTITCRASQDISDYLAW | | |
| mAb) | VRQAPGKGLEWVSAISGS | YQQKPGKIPRLLIYTTSTL | | |
| | GGSAYYADSVKGRFTISRD | QSGVPSRFRGSGSGTDFT | | |
| | NSKNTVYLQMNSLRAEDT | LTISSLQPEDVATYYCQKY | | |
| | AVYYCAKDGAWKMSGLD | DSAPLTFGGGTKVEIK | | |
| | VWGQGTTVIVSS (SEQ ID | (SEQ ID NO: 911) | | |
| | NO: 910) | | | |
| Ublituximab | QAYLQQSGAELVRPGASV | QIVLSQSPAILSASPGEKV | na | na |
| (Format: Whole | KMSCKASGYTFTSYNMH | TMTCRASSSVSYMHWY | | |
| mAb) | WVKQTPRQGLEWIGGIYP | QQKPGSSPKPWIYATSNL | | |
| | GNGDTSYNQKFKGKATLT | ASGVPARFSGSGSGTSYS | | |
| | VGKSSSTAYMQLSSLTSED | FTISRVEAEDAATYYCQQ | | |
| | SAVYFCARYDYNYAMDY | WTFNPPTFGGGTRLEIK | | |
| | WGQGTSVTVSS (SEQ ID | (SEQ ID NO: 913) | | |
| | NO: 912) | | | |
| Ulocuplumab | EVQLVESGGGLVQPGGSL | DIQMTQSPSSLSASVGD | na | na |
| (Format: Whole | RLSCAAAGFTFSSYSMNW | RVTITCRASQGISSWLAW | | |
| mAb) | VRQAPGKGLEWVSYISSRS | YQQKPEKAPKSLIYAASSL | | |
| | RTIYYADSVKGRFTISRDN | QSGVPSRFSGSGSGTDFT | | |
| | AKNSLYLQMNSLRDEDTA | LTISSLQPEDFVTYYCQQY | | |
| | VYYCARDYGGQPPYYYYY | NSYPRTFGQGTKVEIK | | |
| | GMDVWGQGTTVTVSS | (SEQ ID NO: 915) | | |
| | (SEQ ID NO: 914) | | | |
| Urelumab | QVQLQQWGAGLLKPSETL | EIVLTQSPATLSLSPGERA | na | na |
| (Format: Whole | SLTCAVYGGSFSGYYWSW | TLSCRASQSVSSYLAWYQ | | |
| mAb) | IRQSPEKGLEWIGEINHGG | QKPGQAPRLLIYDASNRA | | |
| | YVTYNPSLESRVTISVDTSK | TGIPARFSGSGSGTDFTLT | | |
| | NQFSLKLSSVTAADTAVYY | ISSLEPEDFAVYYCQQRS | | |
| | CARDYGPGNYDWYFDLW | NWPPALTFGGGTKVEIK | | |
| | GRGTLVTVSS (SEQ ID | (SEQ ID NO: 917) | | |
| | NO: 916) | | | |
| Ustekinumab | EVQLVQSGAEVKKPGESL | DIQMTQSPSSLSASVGD | na | na |
| (Format: Whole | KISCKGSGYSFTTYWLGW | RVTITCRASQGISSWLAW | | |
| mAb) | VRQMPGKGLDWIGIMSP | YQQKPEKAPKSLIYAASSL | | |
| | VDSDIRYSPSFQGQVTMS | QSGVPSRFSGSGSGTDFT | | |
| | VDKSITTAYLQWNSLKASD | LTISSLQPEDFATYYCQQY | | |
| | TAMYYCARRRPGQGYFDF | NIYPYTFGQGTKLEIK | | |
| | WGQGTLVTVSS (SEQ ID | (SEQ ID NO: 919) | | |
| | NO: 918) | | | |
| Utomilumab | EVQLVQSGAEVKKPGESL | SYELTQPPSVSVSPGQTA | na | na |
| (Format: Whole | RISCKGSGYSFSTYWISWV | SITCSGDNIGDQYAHWY | | |
| mAb) | RQMPGKGLEWMGKIYPG | QQKPGQSPVLVIYQDKN | | |
| | DSYTNYSPSFQGQVTISAD | RPSGIPERFSGSNSGNTA | | |
| | KSISTAYLQWSSLKASDTA | TLTISGTQAMDEADYYCA | | |
| | MYYCARGYGIFDYWGQG | TYTGFGSLAVFGGGTKLT | | |
| | TLVTVSS (SEQ ID NO: | VL (SEQ ID NO: 921) | | |
| | 920) | | | |
| Vadastuximab | QVQLVQSGAEVKKPGASV | DIQMTQSPSSLSASVGD | na | na |
| (Format: Whole | KVSCKASGYTFTNYDINW | RVTINCKASQDINSYLSW | | |
| mAb ADC) | VRQAPGQGLEWIGWIYP | FQQKPGKAPKTLIYRANR | | |
| | GDGSTKYNEKFKAKATLTA | LVDGVPSRFSGSGSGQD | | |
| | DTSTSTAYMELRSLRSDDT | YTLTISSLQPEDFATYYCL | | |
| | AVYYCASGYEDAMDYWG | QYDEFPLTFGGGTKVEIK | | |
| | QGTTVTVSS (SEQ ID NO: | (SEQ ID NO: 923) | | |
| | 922) | | | |
| Valanafusp | QVQLQQSGPELVKPGALV | DIQMTQSPSSLSASLGER | na | na |
| (Format: Whole | KISCKASGYTFTNYDIHWV | VSLTCRASQDIGGNLYWL | | |
| mAb Fusion) | KQRPGQGLEWIGWIYPG | QQGPDGTIKRLIYATSSL | | |
| | DGSTKYNEKFKGKATLTAD | DSGVPKRFSGSRSGSDYS | | |
| | KSSSTAYMHLSSLTSEKSA | LTISSLESEDFVDYYCLQY | | |
| | VYFCAREWAYWGQGTLV | SSSPWTFGGGTKMEIK | | |
| | TVSA (SEQ ID NO: 924) | (SEQ ID NO: 925) | | |
| Vantictumab | EVQLVESGGGLVQPGGSL | DIELTQPPSVSVAPGQTA | na | na |
| (Format: Whole | RLSCAASGFTFSHYTLSWV | RISCSGDNIGSFYVHWYQ | | |
| mAb) | RQAPGKGLEWVSVISGDG | QKPGQAPVLVIYDKSNRP | | |
| | SYTYYADSVKGRFTISSDNS | SGIPERFSGSNSGNTATL | | |
| | KNTLYLQMNSLRAEDTAV | TISGTQAEDEADYYCQSY | | |
| | YYCARNFIKYVFANWGQG | ANTLSLVFGGGTKLTVL | | |
| | TLVTVSS (SEQ ID NO: | (SEQ ID NO: 927) | | |
| | 926) | | | |
| Vanucizumab | QVQLVQSGAEVKKPGASV | QPGLTQPPSVSVAPGQT | EVQLVESGGGLVQ | DIQMTQSPSSLSA |
| (Format: | KVSCKASGYTFTGYYMHW | ARITCGGNNIGSKSVHW | PGGSLRLSCAASGY | SVGDRVTITCSAS |
| Bispecific mAb) | VRQAPGQGLEWMGWIN | YQQKPGQAPVLVVYDDS | TFTNYGMNWVRQ | QDISNYLNWYQQ |
| | PNSGGTNYAQKFQGRVT | DRPSGIPERFSGSNSGNT | APGKGLEWVGWI | KPGKAPKVLIYFTS |
| | MTRDTSISTAYMELSRLRS | ATLTISRVEAGDEADYYC | NTYTGEPTYAADFK | SLHSGVPSRFSGS |
| | DDTAVYYCARSPNPYYYDS | QVWDSSSDHYVFGTGTK | RRFTFSLDTSKSTAY | GSGTDFTLTISSLQ |
| | SGYYYPGAFDIWGQGTM | VTVL (SEQ ID NO: 929) | LQMNSLRAEDTAV | PEDFATYYCQQYS |
| | VTVSS (SEQ ID NO: 928) | | YYCAKYPHYYGSSH | TVPWTFGQGTKV |
| | | | WYFDVWGQGTLV | EIK (SEQ ID NO: |
| | | | TVSS (SEQ ID NO: | 931) |
| | | | 930) | |
| Varisacumab | QVQLVQSGAEVKKPGASV | DIRMTQSPSSLSASVGDR | na | na |
| (Format: Whole | KVSCKASGGTFSSYAISWV | VTITCRASQSISSYLNWY | | |
| mAb) | RQAPGQGLEWMGGFDP | QQKPGKAPKLLIYAASSL | | |
| | EDGETIYAQKFQGRVTMT | QSGVPSRFSGSGSGTDFT | | |
| | EDTSTDTAYMELSSLRSED | LTISSLQPEDFATYYCQQS | | |
| | TAVYYCATGRSMVRGVIIP | YSTPLTFGGGTKVEIK | | |
| | FNGMDVWGQGTTVTVSS | (SEQ ID NO: 933) | | |
| | (SEQ ID NO: 932) | | | |
| Varlilumab | QVQLVESGGGVVQPGRSL | DIQMTQSPSSLSASVGD | na | na |
| (Format: Whole | RLSCAASGFTFSSYDMHW | RVTITCRASQGISRWLA | | |
| mAb) | VRQAPGKGLEWVAVIWY | WYQQKPEKAPKSLIYAAS | | |
| | DGSNKYYADSVKGRFTISR | SLQSGVPSRFSGSGSGTD | | |
| | DNSKNTLYLQMNSLRAED | FTLTISSLQPEDFATYYCQ | | |
| | TAVYYCARGSGNWGFFD | QYNTYPRTFGQGTKVEIK | | |
| | YWGQGTLVTVSS (SEQ ID | (SEQ ID NO: 935) | | |
| | NO: 934) | | | |
| Vatelizumab | QVQLQESGPGLVKPSETLS | DFVMTQSPAFLSVTPGE | na | na |
| (Format: Whole | LTCTVSGFSLTNYGIHWIR | KVTITCSAQSSVNYIHWY | | |
| mAb) | QPPGKGLEWLGVIWARG | QQKPDQAPKKLIYDTSKL | | |
| | FTNYNSALMSRLTISKDNS | ASGVPSRFSGSGSGTDYT | | |
| | KNQVSLKLSSVTAADTAVY | FTISSLEAEDAATYYCQQ | | |
| | YCARANDGVYYAMDYW | WTTNPLTFGQGTKVEIK | | |
| | GQGTLVTVSS (SEQ ID | (SEQ ID NO: 937) | | |
| | NO: 936) | | | |
| Vedolizumab | QVQLVQSGAEVKKPGASV | DVVMTQSPLSLPVTPGE | na | na |
| (Format: Whole | KVSCKGSGYTFTSYWMH | PASISCRSSQSLAKSYGNT | | |
| mAb) | WVRQAPGQRLEWIGEIDP | YLSWYLQKPGQSPQLLIY | | |
| | SESNTNYNQKFKGRVTLT | GISNRFSGVPDRFSGSGS | | |
| | VDISASTAYMELSSLRSED | GTDFTLKISRVEAEDVGV | | |
| | TAVYYCARGGYDGWDYAI | YYCLQGTHQPYTFGQGT | | |
| | DYWGQGTLVTVSS (SEQ | KVEIK (SEQ ID NO: 939) | | |
| | ID NO: 938) | | | |
| Veltuzumab | QVQLQQSGAEVKKPGSSV | DIQLTQSPSSLSASVGDR | na | na |
| (Format: Whole | KVSCKASGYTFTSYNMHW | VTMTCRASSSVSYIHWF | | |
| mAb) | VKQAPGQGLEWIGAIYPG | QQKPGKAPKPWIYATSN | | |
| | MGDTSYNQKFKGKATLTA | LASGVPVRFSGSGSGTDY | | |
| | DESTNTAYMELSSLRSEDT | TFTISSLQPEDIATYYCQQ | | |
| | AFYYCARSTYYGGDWYFD | WTSNPPTFGGGTKLEIK | | |
| | VWGQGTTVTVSS (SEQ ID | (SEQ ID NO: 941) | | |
| | NO: 940) | | | |
| Vesencumab | EVQLVESGGGLVQPGGSL | DIQMTQSPSSLSASVGD | na | na |
| (Format: Whole | RLSCAASGFTFSSYAMSW | RVTITCRASQYFSSYLAW | | |
| mAb) | VRQAPGKGLEWVSQISPA | YQQKPGKAPKLLIYGASS | | |
| | GGYTNYADSVKGRFTISAD | RASGVPSRFSGSGSGTDF | | |
| | TSKNTAYLQMNSLRAEDT | TLTISSLQPEDFATYYCQQ | | |
| | AVYYCARGELPYYRMSKV | YLGSPPTFGQGTKVEIK | | |
| | MDVWGQGTLVTVSS | (SEQ ID NO: 943) | | |
| | (SEQ ID NO: 942) | | | |
| Vibecotamab | QVQLQQSGAEVKKPGAS | DFVMTQSPDSLAVSLGE | EVQLVESGGGLVQ | QAVVTQEPSLTVS |
| (Format: | VKVSCKASGYTFTDYYMK | RATINCKSSQSLLNTGNQ | PGGSLRLSCAASGF | PGGTVTLTCGSST |
| Bispecific | WVKQSHGKSLEWMGDII | KNYLTWYQQKPGQPPKL | TFSTYAMNWVRQ | GAVTTSNYANW |
| Mixed | PSNGATFYNQKFKGKATL | LIYWASTRESGVPDRFTG | APGKGLEWVGRIR | VQQKPGKSPRGLI |
| mAb and scFV) | TVDRSTSTAYMELSSLRSE | SGSGTDFTLTISSLQAEDV | SKYNNYATYYADS | GGTNKRAPGVPA |
| | DTAVYYCARSHLLRASWF | AVYYCQNDYSYPYTFGG | VKGRFTISRDDSKN | RFSGSLLGGKAAL |
| | AYWGQGTLVTVSS (SEQ | GTKLEIK (SEQ ID NO: | TLYLQMNSLRAED | TISGAQPEDEADY |
| | ID NO: 944) | 945) | TAVYYCVRHGNFG | YCALWYSNHWV |
| | | | DSYVSWFAYWGQ | FGGGTKLTVLEPK |
| | | | GTLVTVSS (SEQ ID | (SEQ ID NO: 947) |
| | | | NO: 946) | |
| Visilizumab | QVQLVQSGAEVKKPGASV | DIQMTQSPSSLSASVGD | na | na |
| (Format: Whole | KVSCKASGYTFISYTMHW | RVTITCSASSSVSYMNWY | | |
| mAb) | VRQAPGQGLEWMGYINP | QQKPGKAPKRLIYDTSKL | | |
| | RSGYTHYNQKLKDKATLT | ASGVPSRFSGSGSGTDFT | | |
| | ADKSASTAYMELSSLRSED | LTISSLQPEDFATYYCQQ | | |
| | TAVYYCARSAYYDYDGFAY | WSSNPPTFGGGTKVEIK | | |
| | WGQGTLVTVSS (SEQ ID | (SEQ ID NO: 949) | | |
| | NO: 948) | | | |
| Vobarilizumab | EVQLVESGGGLVQPGGSL | na | EVQLVESGGGLVQ | na |
| (Format: | RLSCAASGSVFKINVMAW | | PGNSLRLSCAASGF | |
| Bispecific | YRQAPGKGRELVAGIISGG | | TFSSFGMSWVRQ | |
| Single | STSYADSVKGRFTISRDNA | | APGKGLEWVSSIS | |
| Domains (VH- | KNTLYLQMNSLRPEDTAV | | GSGSDTLYADSVK | |
| VH′) | YYCAFITTESDYDLGRRYW | | GRFTISRDNAKTTL | |
| | GQGTLVTVSS (SEQ ID | | YLQMNSLRPEDTA | |
| | NO: 950) | | VYYCTIGGSLSRSS | |
| | | | QGTLVTVSS (SEQ | |
| | | | ID NO: 951) | |
| Vofatamab | EVQLVESGGGLVQPGGSL | DIQMTQSPSSLSASVGD | na | na |
| (Format: Whole | RLSCAASGFTFTSTGISWV | RVTITCRASQDVDTSLA | | |
| mAb) | RQAPGKGLEWVGRIYPTS | WYKQKPGKAPKLLIYSAS | | |
| | GSTNYADSVKGRFTISADT | FLYSGVPSRFSGSGSGTD | | |
| | SKNTAYLQMNSLRAEDTA | FTLTISSLQPEDFATYYCQ | | |
| | VYYCARTYGIYDLYVDYTE | QSTGHPQTFGQGTKVEI | | |
| | YVMDYWGQGTLVTVSS | K (SEQ ID NO: 953) | | |
| | (SEQ ID NO: 952) | | | |
| Volagidemab | QVQLVESGGGVVQPGRSL | DIQMTQSPSSLSASVGD | na | na |
| (Format: Whole | RLSCAASGFTFSSYGMHW | RVTITCRASQGIRNDLG | | |
| mAb) | VRQAPGKGLEWVAVMW | WYQQKPGKAPKRLIYAA | | |
| | YDGSNKDYVDSVKGRFTIS | SSLQSGVPSRFSGSGSGT | | |
| | RDNSKNTLYLQMNRLRAE | EFTLTISSVQPEDFVTYYC | | |
| | DTAVYYCAREKDHYDILTG | LQHNSNPLTFGGGTKVEI | | |
| | YNYYYGLDVWGQGTTVT | K (SEQ ID NO: 955) | | |
| | VSS (SEQ ID NO: 954) | | | |
| Vonlerolizumab | EVQLVQSGAEVKKPGASV | DIQMTQSPSSLSASVGD | na | na |
| (Pogalizumab) | KVSCKASGYTFTDSYMSW | RVTITCRASQDISNYLNW | | |
| (Format: Whole | VRQAPGQGLEWIGDMYP | YQQKPGKAPKLLIYYTSRL | | |
| mAb) | DNGDSSYNQKFRERVTITR | RSGVPSRFSGSGSGTDFT | | |
| | DTSTSTAYLELSSLRSEDTA | LTISSLQPEDFATYYCQQ | | |
| | VYYCVLAPRWYFSVWGQ | GHTLPPTFGQGTKVEIK | | |
| | GTLVTVSS (SEQ ID NO: | (SEQ ID NO: 957) | | |
| | 956) | | | |
| Vopratelimab | EVQLVESGGGLVQPGGSL | DIVMTQSPDSLAVSLGER | na | na |
| (Format: Whole | RLSCAASGFTFSDYWMD | ATINCKSSQSLLSGSFNYL | | |
| mAb) | WVRQAPGKGLVWVSNID | TWYQQKPGQPPKLLIFY | | |
| | EDGSITEYSPFVKGRFTISR | ASTRHTGVPDRFSGSGS | | |
| | DNAKNTLYLQMNSLRAED | GTDFTLTISSLQAEDVAV | | |
| | TAVYYCTRWGRFGFDSW | YYCHHHYNAPPTFGPGT | | |
| | GQGTLVTVSS (SEQ ID | KVDIK | | |
| | NO: 958) | (SEQ ID NO: 959) | | |
| Vorsetuzumab | QVQLVQSGAEVKKPGASV | DIVMTQSPDSLAVSLGER | na | na |
| (Format: Whole | KVSCKASGYTFTNYGMN | ATINCRASKSVSTSGYSF | | |
| mAb ADC) | WVRQAPGQGLKWMGWI | MHWYQQKPGQPPKLLIY | | |
| | NTYTGEPTYADAFKGRVT | LASNLESGVPDRFSGSGS | | |
| | MTRDTSISTAYMELSRLRS | GTDFTLTISSLQAEDVAV | | |
| | DDTAVYYCARDYGDYGM | YYCQHSREVPWTFGQGT | | |
| | DYWGQGTTVTVSS (SEQ | KVEIK | | |
| | ID NO: 960) | (SEQ ID NO: 961) | | |
| Vunakizumab | EVQLVQSGAEVKKPGASV | EIVLTQSPDFQSVTPKEK | na | na |
| (Format: Whole | KVSCKASGYTFTDYEVHW | VTITCSASSSVNYMHWF | | |
| mAb) | VRQAPGQGLEWMGVIDP | QQKPDQSPKLWIYRTSN | | |
| | GTGGVAYNQKFEGRVTM | LASGVPSRFSGSGSGTDY | | |
| | TADTSTSTAYMELRSLRSD | TLTINSLEAEDAATYYCQ | | |
| | DTAVYYCTRYSLFYGSSPY | QRSSYPWTFGQGTKLEIK | | |
| | AMDYWGQGTLVTVSS | (SEQ ID NO: 963) | | |
| | (SEQ ID NO: 962) | | | |
| Xentuzumab | QVELVESGGGLVQPGGSL | DIVLTQPPSVSGAPGQRV | na | na |
| (Format: Whole | RLSCAASGFTFTSYWMSW | TISCSGSSSNIGSNSVSWY | | |
| mAb) | VRQAPGKGLELVSSITSYG | QQLPGTAPKLLIYDNSKR | | |
| | SFTYYADSVKGRFTISRDN | PSGVPDRFSGSKSGTSAS | | |
| | SKNTLYLQMNSLRAEDTA | LAITGLQSEDEADYYCQS | | |
| | VYYCARNMYTHFDSWGQ | RDTYGYYWVFGGGTKLT | | |
| | GTLVTVSS (SEQ ID NO: | VL (SEQ ID NO: 965) | | |
| | 964) | | | |
| Zalifrelimab | EVQLVESGGGLVKPGGSL | EIVLTQSPGTLSLSPGERA | na | na |
| (Format: Whole | RLSCAASGFTFSSYSMNW | TLSCRASQSVSRYLGWY | | |
| mAb) | VRQAPGKGLEWVSSISSSS | QQKPGQAPRLLIYGASTR | | |
| | SYIYYADSVKGRFTISRDNA | ATGIPDRFSGSGSGTDFT | | |
| | KNSLYLQMNSLRAEDTAV | LTITRLEPEDFAVYYCQQY | | |
| | YYCARVGLMGPFDIWGQ | GSSPWTFGQGTKVEIK | | |
| | GTMVTVSS (SEQ ID NO: | (SEQ ID NO: 967) | | |
| | 966) | | | |
| Zalutumumab | QVQLVESGGGVVQPGRSL | AIQLTQSPSSLSASVGDR | na | na |
| (Format: Whole | RLSCAASGFTFSTYGMHW | VTITCRASQDISSALVWY | | |
| mAb) | VRQAPGKGLEWVAVIWD | QQKPGKAPKLLIYDASSL | | |
| | DGSYKYYGDSVKGRFTISR | ESGVPSRFSGSESGTDFT | | |
| | DNSKNTLYLQMNSLRAED | LTISSLQPEDFATYYCQQF | | |
| | TAVYYCARDGITMVRGV | NSYPLTFGGGTKVEIK | | |
| | MKDYFDYWGQGTLVTVS | (SEQ ID NO: 969) | | |
| | S (SEQ ID NO: 968) | | | |
| Zampilimab | EVQLLESGGGLVQPGGSL | DITMTQSPSSLSASVGDR | na | na |
| (Format: Whole | RLSCAASGFTLSTHAMSW | VTITCKASQDINSYLTWF | | |
| mAb) | VRQAPGKGLEWVATISSG | QQKPGKAPKILIYLVNRL | | |
| | GRSTYYPDSVKGRFTISRD | VDGVPSRFSGSGSGQDY | | |
| | NSKNTLYLQMNSLRAEDT | ALTISSLQPEDFATYYCLQ | | |
| | AVYFCARLISTYWGQGTLV | YDDFPYTFGQGTKVEIK | | |
| | TVSS (SEQ ID NO: 970) | (SEQ ID NO: 971) | | |
| Zanolimumab | QVQLQQWGAGLLKPSETL | DIQMTQSPSSVSASVGD | na | na |
| (Format: Whole | SLTCAVYGGSFSGYYWSW | RVTITCRASQDISSWLAW | | |
| mAb) | IRQPPGKGLEWIGEINHSG | YQHKPGKAPKLLIYAASSL | | |
| | STNYNPSLKSRVTISVDTSK | QSGVPSRFSGSGSGTDFT | | |
| | NQFSLKLSSVTAADTAVYY | LTISSLQPEDFATYYCQQ | | |
| | CARVINWFDPWGQGTLV | ANSFPYTFGQGTKLEIK | | |
| | TVSS (SEQ ID NO: 972) | (SEQ ID NO: 973) | | |
| Zenocutuzumab | QVQLVQSGAEVKKPGASV | DIQMTQSPSSLSASVGD | QVQLVQSGAEVKK | DIQMTQSPSSLSA |
| (Format: | KVSCKASGYTFTGYYMHW | RVTITCRASQSISSYLNWY | PGASVKLSCKASGY | SVGDRVTITCRAS |
| Bispecific mAb) | VRQAPGQGLEWMGWIN | QQKPGKAPKLLIYAASSL | TFTAYYINWVRQA | QSISSYLNWYQQ |
| | PNSGGTNYAQKFQGRVT | QSGVPSRFSGSGSGTDFT | PGQGLEWIGRIYP | KPGKAPKLLIYAAS |
| | MTRDTSISTAYMELSRLRS | LTISSLQPEDFATYYCQQS | GSGYTSYAQKFQG | SLQSGVPSRFSGS |
| | DDTAVYYCARDHGSRHF | YSTPPTFGQGTKVEIK | RATLTADESTSTAY | GSGTDFTLTISSLQ |
| | WSYWGFDYWGQGTLVT | (SEQ ID NO: 975) | MELSSLRSEDTAVY | PEDFATYYCQQSY |
| | VSS (SEQ ID NO: 974) | | FCARPPVYYDSAW | STPPTFGQGTKVE |
| | | | FAYWGQGTLVTVS | IK (SEQ ID NO: |
| | | | S (SEQ ID NO: | 977) |
| | | | 976) | |
| Zolbetuximab | QVQLQQPGAELVRPGAS | DIVMTQSPSSLTVTAGEK | na | na |
| (Claudiximab) | VKLSCKASGYTFTSYWIN | VTMSCKSSQSLLNSGNQ | | |
| (Format: Whole | WVKQRPGQGLEWIGNIY | KNYLTWYQQKPGQPPKL | | |
| mAb) | PSDSYTNYNQKFKDKATLT | LIYWASTRESGVPDRFTG | | |
| | VDKSSSTAYMQLSSPTSED | SGSGTDFTLTISSVQAEDL | | |
| | SAVYYCTRSWRGNSFDY | AVYYCQNDYSYPFTFGSG | | |
| | WGQGTTLTVSS (SEQ ID | TKLEIK (SEQ ID NO: | | |
| | NO: 978) | 979) | | |

[0242] It should be understood that the examples and embodiments described herein are for illustrative purposes only and that various modifications or changes in light thereof will be suggested to persons skilled in the art and are to be included within the spirit and purview of this application and the scope of the appended claims. In addition, any elements or limitations of any invention or embodiment thereof disclosed herein can be combined with any and/or all other elements or limitations (individually or in any combination) or any other invention or embodiment thereof disclosed herein, and all such combinations are contemplated within the scope of the invention without limitation thereto.

### REFERENCES

[0243] 1. Maude, S. L., et al., Chimeric antigen receptor T cells for sustained remissions in leukemia. N Engl J Med, 2014. 371(16): p. 1507-17.
[0244] 2. Neelapu, S. S., et al., Axicabtagene Ciloleucel CAR T-Cell Therapy in Refractory Large B-Cell Lymphoma. N Engl J Med, 2017. 377(26): p. 2531-2544.
[0245] 3. Kantarjian, H., et al., Results of inotuzumab ozogamicin, a CD22 monoclonal antibody, in refractory and relapsed acute lymphocytic leukemia. Cancer, 2013. 119(15): p. 2728-36.
[0246] 4. Fry, T. J., et al., CD22-targeted CAR T cells induce remission in B-ALL that is naive or resistant to CD19-targeted CAR immunotherapy. Nat Med, 2018. 24(1): p. 20-28.
[0247] 5. Vogler, I., et al., An improved bicistronic CD20/tCD34 vector for efficient purification and in vivo depletion of gene-modified T cells for adoptive immunotherapy. Mol Ther, 2010. 18(7): p. 1330-8.
[0248] 6. Berger, C., et al., Analysis of transgene-specific immune responses that limit the in vivo persistence of adoptively transferred HSV-TK-modified donor T cells after allogeneic hematopoietic cell transplantation. Blood, 2006. 107(6): p. 2294-302.
[0249] 7. Rodgers, D. T., et al., Switch-mediated activation and retargeting of CAR-T cells for B-cell malignancies. Proc Natl Acad Sci USA, 2016. 113(4): p. E459-68.
[0250] 8. Majzner, R. G. and C. L. Mackall, Tumor Antigen Escape from CAR T-cell Therapy. Cancer Discov, 2018. 8(10): p. 1219-1226.
[0251] 9. Shah, N. N., et al., Multi Targeted CAR-T Cell Therapies for B-Cell Malignancies. Frontiers in Oncology, 2019. 9(146).
[0252] 10. Jia, H., et al., Haploidentical CD19/CD22 bispecific CAR-T cells induced MRD-negative remission in a patient with relapsed and refractory adult BALL after haploidentical hematopoietic stem cell transplantation. J Hematol Oncol, 2019. 12(1): p. 57.
[0253] 11. Qin, H., et al., Preclinical Development of Bivalent Chimeric Antigen Receptors Targeting Both CD19 and CD22. Mol Ther Oncolytics, 2018. 11: p. 127-137.
[0254] 12. Raney, K. D., et al., Hepatitis C virus non-structural protein 3 (HCV NS3): a multifunctional antiviral target. J Biol Chem, 2010. 285(30): p. 22725-31.
[0255] 13. Jacobs, C. L., R. K. Badiee, and M. Z. Lin, StaPLs: versatile genetically encoded modules for engineering drug-inducible proteins. Nat Methods, 2018. 15(7): p. 523-526.
[0256] 14. Jones, K. A., et al., Orthogonal Luciferase-Luciferin Pairs for Bioluminescence Imaging. Journal of the American Chemical Society, 2017. 139(6): p. 2351-2358.

1-43. (canceled)

44. A chimeric antigen receptor (CAR) comprising:
a single light chain variable fragment;
a single heavy chain variable fragment;
a single chain variable fragment linker;
at least one non-structural protein 3 (NS3) protease domain;
at least one cleavage site;
a hinge region;
a transmembrane region;
a CD3-zeta signaling domain; and, optionally,
an intracellular signaling domain, such as an intracellular signaling domain of CD27, CD28, 4-1BB (CD137), OX40, CD30, CD40, PD-1, ICOS (CD278), lymphocyte function-associated antigen-1 (LFA-1), CD2, CD7, TNFSF14, NKG2C, B7-H3, CD132, or ILRβ (CD122).

45. The CAR according to claim 44, wherein the at least one NS3 protease domain is selected from a wild-type HCV NS3 protease domain, a T54A NS3 protease domain, and a NS3 protease domain sensitive to inhibition by a small molecule inhibitor.

46. The CAR according to claim 44, wherein the NS3 protease domain is located between the single light and heavy chain variable fragments and the hinge region or between the hinge region and the transmembrane region.

47. The CAR, according to claim 44, wherein the NS3 protease domain is flanked by one or two cleavage sites.

48. A nucleic acid encoding the CAR according to claim 44.

49. A nucleic acid encoding
a first CAR comprising:
a single light chain variable fragment;
a single heavy chain variable fragment;
a single chain variable fragment linker;
a first non-structural protein 3 (NS3) protease domain;
at least one first cleavage site;
a first hinge region;
a first transmembrane region;
a first CD3-zeta signaling domain; and, optionally,
a first intracellular signaling domain; and
a second CAR comprising:
a single light chain variable fragment;
a single heavy chain variable fragment;
a single chain variable fragment linker;
a second non-structural protein 3 (NS3) protease domain;
at least one second cleavage site;
a second hinge region;
a second transmembrane region;
a second CD3-zeta signaling domain; and, optionally,
a second intracellular signaling domain.

50. The nucleic acid according to claim 49, wherein the first CAR comprises CD19 single light and heavy chain variable fragments and the second CAR comprises CD22 single light and heavy chain variable fragments.

51. The nucleic acid according to claim 49, wherein the first and the second NS3 protease domains are selected from a wild-type HCV NS3 protease domain, a T54A NS3 protease domain, and a NS3 protease domain sensitive to inhibition by a small molecule inhibitor.

52. The nucleic acid according to claim 51, wherein the first and the second NS3 protease domains are NS3 protease domains sensitive to inhibition by small molecule inhibitors.

53. The nucleic acid according to claim 52, wherein the first NS3 protease domain is sensitive to inhibition by a first small molecule inhibitor and the second NS3 protease domain is sensitive to inhibition by a second small molecule inhibitor.

54. A T cell comprising the nucleic acid according to claim 48, wherein the T cell does not express the CAR on the cell surface in the absence of a small molecule protease inhibitor.

55. A T cell comprising the nucleic acid according to claim 49, wherein the T cell does not express the first CAR and/or the second CAR on the cell surface in the absence of a small molecule protease inhibitor.

56. The T cell according to claim 55, wherein the T cell expresses the first CAR and/or the second CAR on the cell surface when contacted with at least one small molecule protease inhibitor.

57. A pharmaceutical composition comprising a T cell according to claim 54.

58. A pharmaceutical composition comprising a T cell according to claim 55.

59. A method of producing a T cell according to claim 54.

60. A method of producing a T cell according to claim 55.

61. A method of treatment of a cancer comprising administering a T cell according to claim 54 or a pharmaceutical composition thereof.

62. A method of treatment of a cancer or an immune disease comprising administering a T cell according to claim 55 or a pharmaceutical composition thereof to a subject suffering from said cancer or immune disease.

63. A method of treatment of an immune disease comprising administering a T cell according to claim 54 to a subject suffering from said immune disease.

The application's sequence listing, which the Patent Office published only in electronic form, follows.

SEQUENCE LISTING (997 sequences)

SEQ ID NO: 1 - protein, 21 aa, Artificial Sequence
  CD8-alpha signal peptide
MALPVTALLLPLALLLHAARP

SEQ ID NO: 2 - protein, 245 aa, Artificial Sequence
  CD19 scFv
IPDIQMTQTTSSLSASLGDRVTISCRASQDISKYLNWYQQKPDGTVKLLIYHTSRLHSGVPSRFSGSGSGTDYSLTISNLEQEDIATYFCQQGNTLPYTFGGGTKLEITGSTSGSGKPGSGEGSTKGEVKLQESGPGLVAPSQSLSVTCTVSGVSLPDYGVSWIRQPPRKGLEWLGVIWGSETTYYNSALKSRLTIIKDNSKSQVFLKMNSLQTDDTAIYYCAKHYYYGGSYAMDYWGQGTSVTV

SEQ ID NO: 3 - protein, 246 aa, Artificial Sequence
  CD22 scFv
QVQLQQSGPGLVKPSQTLSLTCAISGDSVSSNSAAWNWIRQSPSRGLEWLGRTYYRSKWYNDYAVSVKSRITINPDTSKNQFSLQLNSVTPEDTAVYYCAREVTGDLEDAFDIWGQGTMVTVSSGGGGSGGGGSGGGGSDIQMTQSPSSLSASVGDRVTITCRASQTIWSYLNWYQQRPGKAPNLLIYAASSLQSGVPSRFSGRGSGTDFTLTISSLQAEDFATYYCQQSYSIPQTFGQGTKLEIK

SEQ ID NO: 4 - protein, 45 aa, Artificial Sequence
  CD8-alpha hinge
TTTPAPRPPTPAPTIASQPLSLRPEACRPAAGGAVHTRGLDFACD

SEQ ID NO: 5 - protein, 39 aa, Artificial Sequence
  CD28 hinge
IEVMYPPPYLDNEKSNGTIIHVKGKHLCPSPLFPGPSKP

SEQ ID NO: 6 - protein, 12 aa, Artificial Sequence
  IgG4 hinge
ESKYGPPCPSCP

SEQ ID NO: 7 - protein, 12 aa, Artificial Sequence
  IgG4m hinge
ESKYGPPCPPCP

SEQ ID NO: 8 - protein, 12 aa, Artificial Sequence
  IgG1 hinge
EPKSCDKTHTCP

SEQ ID NO: 9 - protein, 12 aa, Artificial Sequence
  IgG2 hinge
ERKCCVECPPCP

SEQ ID NO: 10 - protein, 217 aa, Artificial Sequence
  IgG4 CH2 CH3
APEFLGGPSVFLFPPKPKDTLMISRTPEVTCVVVDVSQEDPEVQFNWYVDGVEVHNAKTKPREEQFNSTYRVVSVLTVLHQDWLNGKEYKCKVSNKGLPSSIEKTISKAKGQPREPQVYTLPPSQEEMTKNQVSLTCLVKGFYPSDIAVEWESNGQPENNYKTTPPVLDSDGSFFLYSRLTVDKSRWQEGNVFSCSVMHEALHNHYTQKSLSLSLGK

SEQ ID NO: 11 - protein, 216 aa, Artificial Sequence
  IgG2 CH2 CH3
APPVAGPSVFLFPPKPKDTLMISRTPEVTCVVVDVSHEDPEVQFNWYVDGVEVHNAKTKPREEQFNSTFRVVSVLTVVHQDWLNGKEYKCKVSNKGLPAPIEKTISKTKGQPREPQVYTLPPSREEMTKNQVSLTCLVKGFYPSDISVEWESNGQPENNYKTTPPMLDSDGSFFLYSKLTVDKSRWQQGNVFSCSVMHEALHNHYTQKSLSLSPGK

SEQ ID NO: 12 - protein, 220 aa, Artificial Sequence
  IgG1 CH2 CH3
PCPAPELLGGPSVFLFPPKPKDTLMISRTPEVTCVVVDVSHEDPEVKFNWYVDGVEVHNAKTKPREEQYNSTYRVVSVLTVLHQDWLNGKEYKCKVSNKALPAPIEKTISKAKGQPREPQVYTLPPSRDELTKNQVSLTCLVKGFYPSDIAVEWESNGQPENNYKTTPPVLDSDGSFFLYSKLTVDKSRWQQGNVFSCSVMHEALHNHYTQKSLSLSPGK

SEQ ID NO: 13 - protein, 27 aa, Artificial Sequence
  CD28 transmembrane domain (TM)
FWVLVVVGGVLACYSLLVTVAFIIFWV

SEQ ID NO: 14 - protein, 24 aa, Artificial Sequence
  CD8-alpha transmembrane domain (TM)
IYIWAPLAGTCGVLLLSLVITLYC

SEQ ID NO: 15 - protein, 22 aa, Artificial Sequence
  CD4 transmembrane domain (TM)
MALIVLGGVAGLLLFIGLGIFF

SEQ ID NO: 16 - protein, 21 aa, Artificial Sequence
  CD3-zeta transmembrane domain (TM)
LCYLLDGILFIYGVILTALFL

SEQ ID NO: 17 - protein, 21 aa, Artificial Sequence
  ICOS transmembrane domain (TM)
FWLPIGCAAFVVVCILGCILI

SEQ ID NO: 18 - protein, 42 aa, Artificial Sequence
  4-1BB intracellular domain
KRGRKKLLYIFKQPFMRPVQTTQEEDGCSCRFPEEEEGGCEL

SEQ ID NO: 19 - protein, 41 aa, Artificial Sequence
  CD28 intracellular domain
RSKRSRLLHSDYMNMTPRRPGPTRKHYQPYAPPRDFAAYRS

SEQ ID NO: 20 - protein, 112 aa, Artificial Sequence
  CD3-zeta intracellular domain
RVKFSRSADAPAYQQGQNQLYNELNLGRREEYDVLDKRRGRDPEMGGKPRRKNPQEGLYNELQKDKMAEAYSEIGMKGERRRGKGHDGLYQGLSTATKDTYDALHMQALPPR

SEQ ID NO: 21 - protein, 119 aa, Artificial Sequence
  Heavy Chain Sequence
QVKLQESGAELARPGASVKLSCKASGYTFTNYWMQWVKQRPGQGLDWIGAIYPGDGNTRYTHKFKGKATLTADKSSSTAYMQLSSLASEDSGVYYCARGEGNYAWFAYWGQGTTVTVSS

SEQ ID NO: 22 - protein, 107 aa, Artificial Sequence
  Light Chain Sequence
DIELTQSPASLSASVGETVTITCQASENIYSYLAWHQQKQGKSPQLLVYNAKTLAGGVSSRFSGSGSGTHFSLKIKSLQPEDFGIYYCQHHYGILPTFGGGTKLEIK

SEQ ID NO: 23 - protein, 120 aa, Artificial Sequence
  Heavy Chain Sequence
QVQLLESGGGLVQPGGSLRLSCAASGFTFSTAAMSWVRQAPGKGLEWVSGISGSGSSTYYADSVKGRFTISRDNSKNTLYLQMNSLRATAVYYCARELSYLYSGYYFDYWGQGTLVTVSS

SEQ ID NO: 24 - protein, 108 aa, Artificial Sequence
  Light Chain Sequence
QSVLTQPPSASGTPGQRVTISCSGSSSNIGSNDVSWYQQLPGTAPKLLIYKNYNRPSGVPDRFSGSKSGTSASLAISGLQSEDEADYYAWDQRQFDVVFGGGTKLTVL

SEQ ID NO: 25 - protein, 118 aa, Artificial Sequence [sequence omitted]

SEQ ID NO: 26 - protein, 107 aa, Artificial Sequence [sequence omitted]

SEQ ID NO: 27 - protein, 118 aa, Artificial Sequence
  Heavy Chain Sequence
QVTLKESGPVLVKPTETLTLTCTVSGFSLTNYHVQWIRQPPGKALEWLGVMWSDGDTSFNSVLKSRLTISRDTSKSQVVLTMTNMDPVATYYCARDGTIAAMDYFDYWGQGTLVTVSS

SEQ ID NO: 28 - protein, 105 aa, Artificial Sequence
  Light Chain Sequence
DIQMTQSPSSLSASVGDRVTITCLASEDISNYLAWYQQKPGKAPKLLIYHTSRLQDGVPSRFSGSGSGTDFTLTISSLQPEDFATYYCGYRFPLTFGGGTKVEIK

SEQ ID NO: 29 - protein, 118 aa, Artificial Sequence [sequence omitted]

SEQ ID NO: 30 - protein, 107 aa, Artificial Sequence [sequence omitted]

SEQ ID NO: 31 - protein, 122 aa, Artificial Sequence
  Heavy Chain Sequence
QVQLVESGGGVVQPGRSLRLSCAASGFSFSNYGMHWVRQAPGKGLEWVALIWYDGSNEDYTDSVKGRFTISRDNSKNTLYLQMNSLRAEDTAVYYCARWGMVRGVIDVFDIWGQGTVVTVSS

SEQ ID NO: 32 - protein, 107 aa, Artificial Sequence
  Light Chain Sequence
DIQMTQSPSSVSASVGDRVTITCRASQGISSWLAWYQHKPGKAPKLLIYAASSLQSGVPSRFSGSGSGTDFTLTISSLQPEDFATYYCQQANSFPWTFGQGTKVEIK

SEQ ID NO: 33 - protein, 121 aa, Artificial Sequence [sequence omitted]

SEQ ID NO: 34 - protein, 107 aa, Artificial Sequence [sequence omitted]

SEQ ID NO: 35 - protein, 124 aa, Artificial Sequence
  Heavy Chain Sequence
QVQLVESGGGVVQPGRSLRLSCAASGFAFSSYGMHWVRQAPGKGLEWVAVIWFDGTKKYYTDSVKGRFTISRDNSKNTLYLQMNTLRAEDTAVYYCARDRGIGARRGPYYMDVWGKGTTVTVSS

SEQ ID NO: 36 - protein, 107 aa, Artificial Sequence [sequence omitted]

SEQ ID NO: 37 - protein, 123 aa, Artificial Sequence
  Heavy Chain Sequence
EVQLVESGGGLVQPGRSLRLSCAASGFTFDDYAMHWVRQAPGKGLEWVSGINWSSGGIGYADSVKGRFTISRDNAKNSLYLQMNSLRAEDTALYYCARDIGGFGEFYWNFGLWGRGTLVTVSS

SEQ ID NO: 38 - protein, 108 aa, Artificial Sequence
  Light Chain Sequence
EIVLTQSPATLSLSPGERATLSCRASQSVRSYLAWYQQKPGQAPRLLIYDASNRATGIPARFSGSGSGTDFTLTISSLEPEDFAVYYCQQRSNWPPATFGGGTKVEIK

SEQ ID NO: 39 - protein, 117 aa, Artificial Sequence
  Heavy Chain Sequence
EVQLVESGGGLVQPGGSLRLSCAASGFTFSSYGMSWVRQAPGKGLEWVATITSGGSYTYYVDSVKGRFTISRDNAKNTLYLQMNSLRAEDTAVYYCVRIGEDALDYWGQGTLVTVSS

SEQ ID NO: 40 - protein, 107 aa, Artificial Sequence
  Light Chain Sequence
DIQMTQSPSSLSASVGDRVTITCRASQDIAGSLNWLQQKPGKAIKRLIYATSSLDSGVPKRFSGSRSGSDYTLTISSLQPEDFATYYCLQYGSFPPTFGQGTKVEIK

SEQ ID NO: 41 - protein, 121 aa, Artificial Sequence
  Heavy Chain Sequence
QVQLQESGPGLVRPSQTLSLTCTVSGFTFTDFYMNWVRQPPGRGLEWIGFIRDKAKGYTTEYNPSVKGRVTMLVDTSKNQFSLRLSSVTAADTAVYYCAREGHTAAPFDYWGQGSLVTVSS

SEQ ID NO: 42 - protein, 107 aa, Artificial Sequence
  Light Chain Sequence
DIQMTQSPSSLSASVGDRVTITCKASQNIDKYLNWYQQKPGKAPKLLIYNTNNLQTGVPSRFSGSGSGTDFTFTISSLQPEDIATYYCLQHISRPRTFGQGTKVEIK

SEQ ID NO: 43 - protein, 118 aa, Artificial Sequence [sequence omitted]

SEQ ID NO: 44 - protein, 113 aa, Artificial Sequence [sequence omitted]

SEQ ID NO: 45 - protein, 119 aa, Artificial Sequence
  Heavy Chain Sequence
QVQLQQSGPELEKPGASVKISCKASGYSFTGYTMNWVKQSHGKSLEWIGLITPYNGASSYNQKFRGKATLTVDKSSSTAYMDLLSLTSEDSAVYFCARGGYDGRGFDYWGSGTPVTVSS

SEQ ID NO: 46 - protein, 106 aa, Artificial Sequence
  Light Chain Sequence
DIELTQSPAIMSASPGEKVTMTCSASSSVSYMHWYQQKSGTSPKRWIYDTSKLASGVPGRFSGSGSGNSYSLTISSVEAEDDATYYCQQWSKHPLTFGSGTKVEIK

SEQ ID NO: 47 - protein, 115 aa, Artificial Sequence
  Heavy Chain Sequence
QVQLQESGPGLVKPSETLSLTCTVSGFSLLSYGVHWVRQPPGKGLEWLGVIWTGGTTNYNSALMSRFTISKDDSKNTVYLKMNSLKTEDTAIYYCARYYYGMDYWGQGTLVTVSS

SEQ ID NO: 48 - protein, 107 aa, Artificial Sequence
  Light Chain Sequence
DIQMTQSPSSLSASVGDRVTITCKASQDVRNTVAWYQQKPGKAPKLLIYSSSYRNTGVPDRFSGSGSGTDFTLTISSLQAEDVAVYYCQQHYITPYTFGGGTKVEIK

SEQ ID NO: 49 - protein, 120 aa, Artificial Sequence
  Heavy Chain Sequence
QVELVQSGAEVKKPGESLKISCKGSGYSFTSYWIGWVRQAPGKGLEWMGIIDPGDSRTRYSPSFQGQVTISADKSISTAYLQWSSLKASDTAMYYCARGQLYGGTYMDGWGQGTLVTVSS

SEQ ID NO: 50 - protein, 111 aa, Artificial Sequence
  Light Chain Sequence
DIALTQPASVSGSPGQSITISCTGTSSDIGGYNSVSWYQQHPGKAPKLMIYGVNNRPSGVSNRFSGSKSGNTASLTISGLQAEDEADYYCSSYDIESATPVFGGGTKLTVL

SEQ ID NO: 51 - protein, 117 aa, Artificial Sequence [sequence omitted]

SEQ ID NO: 52 - protein, 108 aa, Artificial Sequence [sequence omitted]

SEQ ID NO: 53 - protein, 118 aa, Artificial Sequence
  Heavy Chain Sequence
EVQLVESGGGLVQPGGSLRLSCAASGFTFISYAMSWVRQAPGKGLEWVASISSGGNTYYPDSVKGRFTISRDNAKNSLYLQMNSLRAEDTAVYYCARLDGYYFGFAYWGQGTLVTVSS

SEQ ID NO: 54 - protein, 111 aa, Artificial Sequence
  Light Chain Sequence
DIQMTQSPSSLSASVGDRVTITCKASESVDNYGKSLMHWYQQKPGKAPKLLIYRASNLESGVPSRFSGSGSGTDFTLTISSLQPEDFATYYCQQSNEDPWTFGGGTKVEIK

SEQ ID NO: 55 - protein, 121 aa, Artificial Sequence
  Heavy Chain Sequence
EVKLLESGGGLVQPGGSLKLSCAASGFDFSRYWMSWVRQAPGKGLEWIGEINPTSSTINFTPSLKDKVFISRDNAKNTLYLQMSKVRSEDTALYYCARGNYYRYGDAMDYWGQGTSVTVSS

SEQ ID NO: 56 - protein, 111 aa, Artificial Sequence
  Light Chain Sequence
DIALTQSPASLAVSLGQRATISCRASKSVSTSGYSYLHWYQQKPGQPPKLLIYLASNLESGVPARFSGSGSGTDFTLNIHPVEEEDAATYYCQHSRELPFTFGSGTKLEIK

SEQ ID NO: 57 - protein, 122 aa, Artificial Sequence
  Heavy Chain Sequence
EVQLLESGGGLVQPGGSLRLSCAASGFTFSSYAMSWVRQAPGKGLEWVSAISGSGTSTYYADSVKGRFTISRDNSKNTLYLQMNSLRAEDTAVYYCARVRYNWNHGDWFDPWGQGTLVTVSS

SEQ ID NO: 58 - protein, 110 aa, Artificial Sequence
  Light Chain Sequence
QSVLTQPPSASGTPGQRVTISCSGSSSNIGNNYVSWYQQLPGTAPKLLIYENYNRPAGVPDRFSGSKSGTSASLAISGLRSEDEADYYCSSWDDSLNYWVFGGGTKLTVL

SEQ ID NO: 59 - protein, 118 aa, Artificial Sequence
  Heavy Chain Sequence
QVQLQESGPGLVKPSQTLSLTCTVSGGSISSGEYYWNWIRQHPGKGLEWIGYIYYSGSTYYNPSLKSRVTISVDTSKNQFSLKLSSVTAADTAVYYCARESVAGFDYWGQGTLVTVSS

SEQ ID NO: 60 - protein, 108 aa, Artificial Sequence
  Light Chain Sequence
EIVLTQSPGTLSLSPGERATLSCRASQSVSSSYLAWYQQKPGQAPRLLIYGTSSRATGIPDRFSGSGSGTDFTLTISRLEPEDFAVYYCQQYGSSPITFGQGTRLEIK

SEQ ID NO: 61 - protein, 118 aa, Artificial Sequence [sequence omitted]

SEQ ID NO: 62 - protein, 107 aa, Artificial Sequence [sequence omitted]

SEQ ID NO: 63 - protein, 119 aa, Artificial Sequence
  Heavy Chain Sequence
EVQLQESGPGLVRPSETLSLTCAVSGYSISSGMGWGWIRQPPGKGLEWIGSIDQRGSTYYNPSLKSRVTISVDTSKNQFSLKLSSVTAADTAVYYCARDAGHAVDMDVWGKGTTVTVSS

SEQ ID NO: 64 - protein, 107 aa, Artificial Sequence
  Light Chain Sequence
DIQMTQSPSSVSASVGDRVTITCRASQGISRWLAWYQQKPGKAPKLLIYAASSLQSGVPSRFSGSGSGTDFTLTISSLQPEDFATYYCQQGYVFPLTFGGGTKVEIK

SEQ ID NO: 65 - protein, 114 aa, Artificial Sequence
  Heavy Chain Sequence
EVQLVESGGGLVQPGGSLRLSCAASGFTFSNYWMSWVRQAPGKGLEWVATIKQDGSQKNYVDSVKGRFTISRDNAKNSLYLRLNSLRAEDTAVYYCATELFDLWGRGSLVTVSS

SEQ ID NO: 66 - protein, 107 aa, Artificial Sequence
  Light Chain Sequence
EIVLTQSPATLSLSPGERATLSCRASQSVSSYLAWYQQKPGQAPRLLIYDASNRATGIPARFSGSGSGTDFTLTISSLEPEDFAVYYCQQRSNWPITFGQGTKLEIK

SEQ ID NO: 67 - protein, 116 aa, Artificial Sequence
  Heavy Chain Sequence
QVQLVESGGGVVQPGRSLRLSCAASGFTFNNYGMHWVRQAPGMGLEWVAVIWHDGSDKYYADSVKGRFTISRDNSKNTLYLQMNSLRAEDTAVYYCARNWNLFDYWGQGTLVTVSS

SEQ ID NO: 68 - protein, 108 aa, Artificial Sequence
  Light Chain Sequence
DIQMTQSPSSLSASVGDRITITCRASQSISTYLHWYQQKPGKAPKLLIYAASTLQSGVPSRFSGSGSGTDFTLTISSLQPEDFATYYCQQSFSTPPINFGQGTKLEIK

SEQ ID NO: 69 - protein, 120 aa, Artificial Sequence
  Heavy Chain Sequence
EVQLLESGGGLVQPGGSLRLSCAASGFTFSSYIMMWVRQAPGKGLEWVSSIYPSGGITFYADTVKGRFTISRDNSKNTLYLQMNSLRAEDTAVYYCARIKLGTVTTVDYWGQGTLVTVSS

SEQ ID NO: 70 - protein, 110 aa, Artificial Sequence
  Light Chain Sequence
QSALTQPASVSGSPGQSITISCTGTSSDVGGYNYVSWYQQHPGKAPKLMIYDVSNRPSGVSNRFSGSKSGNTASLTISGLQAEDEADYYCSSYTSSSTRVFGTGTKVTVL

SEQ ID NO: 71 - protein, 117 aa, Artificial Sequence
  Heavy Chain Sequence
EVQLVESGGGLVQPGGSLRLSCAASGFTFSDYYMAWVRQAPGKGLEWVASINYDGSSTYYVDSVKGRFTISRDNAKNSLYLQMNSLRAEDTAVYYCARDRGYYFDYWGQGTTVTVSS

SEQ ID NO: 72 - protein, 113 aa, Artificial Sequence
  Light Chain Sequence
DVVMTQTPLSLSVTPGQPASISCRSSQSLVHSNGNTYLHWYLQKPGQSPQLLIYKVSNRFSGVPDRFSGSGSGTDFTLKISRVEAEDVGVYFCSQSTHVPPFTFGGGTKVEIK

SEQ ID NO: 73 - protein, 113 aa, Artificial Sequence
  Heavy Chain Sequence
QVQLVESGGGVVQPGRSLRLSCAASGFTFSSYGMHWVRQAPGKGLEWVAVIWYDGSNKYYADSVKGRFTISRDNSKNTLYLQMNSLRAEDTAVYYCASNGDHWGQGTLVTVSS

SEQ ID NO: 74 - protein, 107 aa, Artificial Sequence
  Light Chain Sequence
EIVMTQSPATLSVSPGERATLSCRASQSVSSNLAWYQQKPGQAPRLLIYGASTRATGIPARFSGSGSGTEFTLTISSLQSEDFAVYYCQQYNNWPRTFGQGTKVEIK

SEQ ID NO: 75 - protein, 119 aa, Artificial Sequence [sequence omitted]

SEQ ID NO: 76 - protein, 112 aa, Artificial Sequence [sequence omitted]

SEQ ID NO: 77 - protein, 117 aa, Artificial Sequence [sequence omitted]

SEQ ID NO: 78 - protein, 104 aa, Artificial Sequence [sequence omitted]

SEQ ID NO: 79 - protein, 120 aa, Artificial Sequence
  Heavy Chain Sequence
EVQLQQSGPELEKPGASVKLSCKASGYSFTGYNMNWVKQSHGKSLEWIGHIDPYYGDTSYNQKFRGKATLTVDKSSSTAYMQLKSLTSEDSAVYYCVKGGYYGHWYFDVWGAGTTVTVSS

SEQ ID NO: 80 - protein, 107 aa, Artificial Sequence
  Light Chain Sequence
DIQMTQSPSSLSASLGERVSLTCRASQDIGSSLNWLQQGPDGTIKRLIYATSSLDSGVPKRFSGSRSGSDYSLTISSLESEDFVDYYCLQYVSSPPTFGAGTKLELK

SEQ ID NO: 81 - protein, 125 aa, Artificial Sequence
  Heavy Chain Sequence
EVQLVESGGDLVKPGGSLRLSCVASGFTFSSHGMHWVRQSPGKGLQWVAVINSGGSSTYYTDAVKGRFTISRDNAKNTVYLQMNSLRAEDTAMYYCAKESVGGWEQLVGPHFDYWGQGTLVIVSS

SEQ ID NO: 82 - protein, 110 aa, Artificial Sequence
  Light Chain Sequence
QSVLTQPTSVSGSLGWRVTISCSGSTNNIGILGASWYQLFPGKAPKLLVYGNGNRPSGVPDRFSGADSGDSVTLTITGLQAEDEADYYCQSFDTTLGAHVFGGGTHLTVL

SEQ ID NO: 83 - protein, 120 aa, Artificial Sequence
  Heavy Chain Sequence
QVQLQQSGAELVKPGASVKLSCKASGYTFRSYDINWVRQRPEQGLEWIGWIFPGDGSTKYNEKFKGKATLTTDKSSSTAYMQLSRLTSEDSAVYFCARWTVVGPGYFDVWGAGTTVTVSS

SEQ ID NO: 84 - protein, 106 aa, Artificial Sequence
  Light Chain Sequence
QIVLTQSPAIMSASPGEKVTITCSASSSVSYMNWFQQKPGTSPKLWIYSTSNLASGVPARFSGSGSGTSYSLTISRMEAEDAATYYCQQRSSYPNTFGGGTKLEIK

SEQ ID NO: 85 - protein, 121 aa, Artificial Sequence
  Heavy Chain Sequence
QVQLVQSGAEVKKPGSSVKVSCKASGGTFSNYWMHWVRQAPGQGLEWMGATYRGHSDTYYNQKFKGRVTITADKSTSTAYMELSSLRSEDTAVYYCARGAIYDGYDVLDNWGQGTLVTVSS

SEQ ID NO: 86 - protein, 107 aa, Artificial Sequence
  Light Chain Sequence
DIQMTQSPSSLSASVGDRVTITCSASQDISNYLNWYQQKPGKAPKLLIYYTSNLHSGVPSRFSGSGSGTDFTLTISSLQPEDFATYYCQQYRKLPWTFGQGTKLEIK

SEQ ID NO: 87 - protein, 123 aa, Artificial Sequence
  Heavy Chain Sequence
QVQLQQSGAEVKKPGSSVRVSCKASGGTFNNNAINWVRQAPGQGLEWMGGIIPMFGTAKYSQNFQGRVAITADESTGTASMELSSLRSEDTAVYYCARSRDLLLFPHHALSPWGRGTMVTVSS

SEQ ID NO: 88 - protein, 108 aa, Artificial Sequence
  Light Chain Sequence
SSELTQDPAVSVALGQTVRVTCQGDSLRSYYASWYQQKPGQAPVLVIYGKNNRPSGIPDRFSGSSSGNTASLTITGAQAEDEADYYCSSRDSSGNHWVFGGGTELTVL

SEQ ID NO: 89 - protein, 114 aa, Artificial Sequence [sequence omitted]

SEQ ID NO: 90 - protein, 107 aa, Artificial Sequence [sequence omitted]

SEQ ID NO: 91 - protein, 121 aa, Artificial Sequence [sequence omitted]

SEQ ID NO: 92 - protein, 107 aa, Artificial Sequence [sequence omitted]

SEQ ID NO: 93 - protein, 119 aa, Artificial Sequence
  Heavy Chain Sequence
ELQLQESGPGLVKPSETLSLTCTVSGGSISSGSYYWDWIRQPPGKGLEWIGNIYKSGSTYYNPSLKSRVTISVDTSKNQFSLKLSSVTAADTAVYYCARERGMHYMDVWGKGTTVTVSS

SEQ ID NO: 94 - protein, 107 aa, Artificial Sequence
  Light Chain Sequence
DIQMTQSPSSLSASVGDRVTITCRASQSINSYLNWYQQKPGKAPKLLIYAASSLQSGVPSRFSGSGSGTDFTLTISSLQPEDFATYYCQQQFDPPFTFGGGTKVEIK

SEQ ID NO: 95 - protein, 122 aa, Artificial Sequence
  Heavy Chain Sequence
QVQLVESGGGVVQPGRSLRLSCTASGFTFSMFGVHWVRQAPGKGLEWVAAVSYDGSNKYYAESVKGRFTISRDNSKNILFLQMDSLRLEDTAVYYCARGRPKVVIPAPLAHWGQGTLVTFSS

SEQ ID NO: 96 - protein, 107 aa, Artificial Sequence
  Light Chain Sequence
DIQMTQSPSSVSASVGDRVTITCRASQGISSWLAWYQQKPGKAPKLLIYEASNLETGVPSRFSGSGSGSDFTLTISSLQPEDFATYYCQQTSSFLLSFGGGTKVEHK

SEQ ID NO: 97 - protein, 117 aa, Artificial Sequence
  Heavy Chain Sequence
EVQLLESGGGLVQPGGSLRLSCAASGFTFSNAWMSWVRQAPGKGLEWVAFIWYDGSNKYYADSVKGRFTISRDNSKNTLYLQMNSLRAEDTAVYYCARYSGWYFDYWGQGTLVTVSS

SEQ ID NO: 98 - protein, 111 aa, Artificial Sequence
  Light Chain Sequence
QSVLTQPPSASGTPGQRVTISCTGSSSNIGAGYDVHWYQQLPGTAPKLLIYDNNNRPSGVPDRFSGSKSGTSASLAISGLRSEDEADYYCQSYDSSLSAWLFGGGTKLTVL

SEQ ID NO: 99 - protein, 123 aa, Artificial Sequence [sequence omitted]

SEQ ID NO: 100 - protein, 107 aa, Artificial Sequence [sequence omitted]

SEQ ID NO: 101 - protein, 119 aa, Artificial Sequence
  Heavy Chain Sequence
EVQLVQSGAEVKKSGESLKISCKGSGYSFTSYWIGWVRQMPGKGLEWMGIFYPGDSSTRYSPSFQGQVTISADKSVNTAYLQWSSLKASDTAMYYCARRRNWGNAFDIWGQGTMVTVSS

SEQ ID NO: 102 - protein, 108 aa, Artificial Sequence
  Light Chain Sequence
EIVLTQSPGTLSLSPGERATLSCRASQSVSSSYLAWYQQKPGQAPRLLIYGASSRATGIPDRFSGSGSGTDFTLTISRLEPEDFAVYYCQQYGSSTWTFGQGTKVEIK

SEQ ID NO: 103 - protein, 115 aa, Artificial Sequence [sequence omitted]

SEQ ID NO: 104 - protein, 111 aa, Artificial Sequence [sequence omitted]

SEQ ID NO: 105 - protein, 125 aa, Artificial Sequence
  Heavy Chain Sequence
EVQLVESGGGLVQPGGSLRLSCAASGFTFSDYNMAWVRQAPGKGLEWVATITYEGRNTYYRDSVKGRFTISRDNAKNSLYLQMNSLRAEDTAVYYCASPPQYYEGSIYRLWFAHWGQGTLVTVSS

SEQ ID NO: 106 - protein, 107 aa, Artificial Sequence
  Light Chain Sequence
AIQLTQSPSSLSASVGDRVTITCRADESVRTLMHWYQQKPGKAPKLLIYLVSNSEIGVPDRFSGSGSGTDFRLTISSLQPEDFATYYCQQTWSDPWTFGQGTKVEIK

SEQ ID NO: 107 - protein, 119 aa, Artificial Sequence
  Heavy Chain Sequence
EVQLVESGGGLVQPGGSLRLSCAASGFTFNTYAMYWIRQAPGKGLEWVARIRSKSNNYAIYYADSVKDRFTISRDDSKNSLYLQMNSLKTEDTAVYYCARPYSDSFAYWGQGTLVTVSS

SEQ ID NO: 108 - protein, 112 aa, Artificial Sequence
  Light Chain Sequence
DVVMTQSPLSLPVTPGEPASISCRSSQSLVHSTGNTYLHWYLQKPGQSPQLLIYKVSNRFSGVPDRFSGSGSGTDFTLKISRVEAEDVGVYYCSQSTHVPFTFGGGTKVEIK

SEQ ID NO: 109 - protein, 121 aa, Artificial Sequence
  Heavy Chain Sequence
QLQLQESGPGLLKPSETLSLTCTVSGGSISSPGYYGGWIRQPPGKGLEWIGSIYKSGSTYHNPSLKSRVTISVDTSKNQFSLKLSSVTAADTAVYYCTRPVVRYFGWFDPWGQGTLVTVSS

SEQ ID NO: 110 - protein, 106 aa, Artificial Sequence
  Light Chain Sequence
AIQLTQSPSSLSASVGDRVTITCRASQGISSALAWYQQKPGKAPKLLIYDASNLESGVPSRFSGSGSGTDFTLTISSLQPEDFATYYCQQFNSYPTFGQGTKVEIK

SEQ ID NO: 111 - protein, 124 aa, Artificial Sequence
  Heavy Chain Sequence
QVQLQQSGAELVRPGSSVKISCKASGYAFSSYWMNWVKQRPGQGLEWIGQIWPGDGDTNYNGKFKGKATLTADESSSTAYMQLSSLASEDSAVYFCARRETTTVGRYYYAMDYWGQGTTVTVSS

SEQ ID NO: 112 - protein, 111 aa, Artificial Sequence
  Light Chain Sequence
DIQLTQSPASLAVSLGQRATISCKASQSVDYDGDSYLNWYQQIPGQPPKLLIYDASNLVSGIPPRFSGSGSGTDFTLNIHPVEKVDAATYHCQQSTEDPWTFGGGTKLEIK

SEQ ID NO: 113 - protein, 118 aa, Artificial Sequence
  Heavy Chain Sequence (if bispec)
DIKLQSGAELARPGASVKMSCKTSGYTFTRYTMHWVKQRPGQGLEWIGYINPSRGYTNYNQKFKDKATLTTDKSSSTAYMQLSSLTSEDSAVYYCARYYDDHYCLDYWGQGTTLTVSS

SEQ ID NO: 114 - protein, 106 aa, Artificial Sequence
  Light Chain Sequence (if bispec)
DIQLTQSPAIMSASPGEKVTMTCRASSSVSYMNWYQQKSGTSPKRWIYDTSKVASGVPYRFSGSGSGTSYSLTISSMEAEDAATYYCQQWSSNPLTFGAGTKLELK

SEQ ID NO: 115 - protein, 113 aa, Artificial Sequence
  Heavy Chain Sequence
QVQLQQSRAELVRPGASVTLSCKPSGYTFTDYEVHWVKQTPVHGLEWIGAIDPETGGTADNQKFKGKAILTADKSSSTAYMELRSLTSEDSAVYYCTNFVDVWGTGTTVTVSS

SEQ ID NO: 116 - protein, 110 aa, Artificial Sequence
  Light Chain Sequence
DVVMSQSPSSLAVSVGEKVTMSCKSSQSLLYSGNQKNYLAWYQQKPGQSPRLLIYWASTRESGVPDRFTGSGSGTDFTLTISSVKAEDLAVFYCQQYYNYPLTFGGGTHL

SEQ ID NO: 117 - protein, 118 aa, Artificial Sequence [sequence omitted]

SEQ ID NO: 118 - protein, 107 aa, Artificial Sequence [sequence omitted]

SEQ ID NO: 119 - protein, 118 aa, Artificial Sequence
  Heavy Chain Sequence
QVQLVQSGAEVKKPGASVKVSCKASGYTFTSYYMHWVRQAPGQGLEWMGEISPFGGRTNYNEKFKSRVTMTRDTSTSTVYMELSSLRSEDTAVYYCARERPLYASDLWGQGTTVTVSS

SEQ ID NO: 120 - protein, 107 aa, Artificial Sequence
  Light Chain Sequence
DIQMTQSPSSLSASVGDRVTITCRASQGISSALAWYQQKPGKAPKLLIYSASYRYTGVPSRFSGSGSGTDFTFTISSLQPEDIATYYCQQRYSLWRTFGQGTKLEIK

SEQ ID NO: 121 - protein, 124 aa, Artificial Sequence
  Heavy Chain Sequence
QVQLVESGGGVVQPGRSLRLSCAASGFTFSSYGMHWVRQAPGKGLEWVAVIWYDGSNEYYADSVKGRFTISRDNSKNTLYLQMNSLRAEDTAVYYCARDRGYTSSWYPDAFDIWGQGTMVTVSS

SEQ ID NO: 122 - protein, 111 aa, Artificial Sequence
  Light Chain Sequence
QSVLTQPPSVSGAPGQRVTISCTGSSSNTGAGYDVHWYQQVPGTAPKLLIYGSGNRPSGVPDRFSGSKSGTSASLAITGLQAEDEADYYCQSYDSSLSGWVFGGGTRLTVL

SEQ ID NO: 123 - protein, 117 aa, Artificial Sequence
  Heavy Chain Sequence
QIQLQQSGPEVVKPGASVKISCKASGYTFTDYYITWVKQKPGQGLEWIGWIYPGSGNTKYNEKFKGKATLTVDTSSSTAFMQLSSLTSEDTAVYFCANYGNYWFAYWGQGTQVTVSA

SEQ ID NO: 124 - protein, 111 aa, Artificial Sequence
  Light Chain Sequence
DIVLTQSPASLAVSLGQRATISCKASQSVDFDGDSYMNWYQQKPGQPPKVLIYAASNLESGIPARFSGSGSGTDFTLNIHPVEEEDAATYYCQQSNEDPWTFGGGTKLEIK

SEQ ID NO: 125 - protein, 115 aa, Artificial Sequence [sequence omitted]

SEQ ID NO: 126 - protein, 111 aa, Artificial Sequence [sequence omitted]

SEQ ID NO: 127 - protein, 116 aa, Artificial Sequence
  Heavy Chain Sequence
QVQLVQSGAEVKKPGASVKVSCKASGYTFTRYGISWVRQAPGQGLEWMGWISTYSGNTNYAQKLQGRVTMTTDTSTSTAYMELRSLRSDDTAVYYCARRQLYFDYWGQGTLVTVSS

SEQ ID NO: 128 - protein, 107 aa, Artificial Sequence
  Light Chain Sequence
EIVMTQSPATLSVSPGERATLSCRASQSVSSNLAWFQQKPGQAPRPLIYDASTRATGVPARFSGSGSGTDFTLTISSLQSEDFAVYYCQQYDNWPLTFGGGTKVEIK

SEQ ID NO: 129 - protein, 120 aa, Artificial Sequence
  Heavy Chain Sequence
EVQLVESGGGLVQPGGSLRLSCTASGFSLTDYYYMTWVRQAPGKGLEWVGFIDPDDDPYYATWAKGRFTISRDNSKNTLYLQMNSLRAEDTAVYYCAGGDHNSGWGLDIWGQGTLVTVSS

SEQ ID NO: 130 - protein, 112 aa, Artificial Sequence
  Light Chain Sequence
MEIVMTQSPSTLSASVGDRVIITCQASEIIHSWLAWYQQKPGKAPKLLIYLASTLASGVPSRFSGSGSGAEFTLTISSLQPDDFATYYCQNVYLASTNGANFGQGTKLTVLG

SEQ ID NO: 131 - protein, 121 aa, Artificial Sequence
  Heavy Chain Sequence
QVQLVQSGAEVKKPGASVKISCKVSGYTLRGYWIEWVRQAPGKGLEWIGQILPGTGRTNYNEKFKGRVTMTADTSTDTAYMELSSLRSEDTAVYYCARFDGNYGYYAMDYWGQGTTVTVSS

SEQ ID NO: 132 - protein, 109 aa, Artificial Sequence
  Light Chain Sequence
QAVVTQEPSLTVSPGGTVTLTCRSSTGAVTTSNYANWFQQKPGQAPRTLIGGTNNRAPGVPARFSGSLLGGKAALTLSGAQPEDEAEYYCALWYSNHWVFGGGTKLTVL

SEQ ID NO: 133 - protein, 118 aa, Artificial Sequence
  Heavy Chain Sequence
EIQLVQSGAEVKKPGSSVKVSCKASGYTFTHYGMNWVRQAPGQGLEWVGWVNTYTGEPTYADDFKGRLTFTLDTSTSTAYMELSSLRSEDTAVYYCTREGEGLGFGDWGQGTTVTVSS

SEQ ID NO: 134 - protein, 112 aa, Artificial Sequence
  Light Chain Sequence
DVVMTQSPLSLPVTPGEPASISCRSSQSIVHSHGDTYLEWYLQKPGQSPQLLIYKVSNRFSGVPDRFSGSGSGTDFTLKISRVEAEDVGVYYCFQGSHIPVTFGQGTKLEIK

SEQ ID NO: 135 - protein, 117 aa, Artificial Sequence
  Heavy Chain Sequence
QVQLVQSGAEVKKPGASVKVSCKASGYTFTNHYMHWVRQAPGQGLEWMGIINPISGSTSNAQKFQGRVTMTRDTSTSTVYMELSSLRSEDTAVYYCARDIVDAFDFWGQGTMVTVSS

SEQ ID NO: 136 - protein, 106 aa, Artificial Sequence
  Light Chain Sequence
AIQLTQSPSSLSASVGDRVTITCRASQGISSALVWYQQKPGKAPKLLIYDASSLESGVPSRFSGSGSGTDFTLTISSLQPEDFATYYCQQFNDYFTFGPGTKVDIK

SEQ ID NO: 137 - protein, 122 aa, Artificial Sequence
  Heavy Chain Sequence
QVQLVQSGAEVKKPGSSVKVSCKASGYTFTDNYMIWVRQAPGQGLEWMGDINPYNGGTTFNQKFKGRVTITADKSTSTAYMELSSLRSEDTAVYYCARESPYFSNLYVMDYWGQGTLVTVSS

SEQ ID NO: 138 - protein, 111 aa, Artificial Sequence
  Light Chain Sequence
EIVLTQSPATLSLSPGERATLSCKASQSVDYDGDNYMNWYQQKPGQAPRLLIYAASNLESGIPARFSGSGSGTDFTLTISSLEPEDFAVYYCHLSNEDLSTFGGGTKVEIK

SEQ ID NO: 139 - protein, 115 aa, Artificial Sequence
  Heavy Chain Sequence
QVQLVQSGAEVKKPGSSVKVSCKASGGTFSRYIINWVRQAPGQGLEWMGRIIPILGVENYAQKFQGRVTITADKSTSTAYMELSSLRSEDTAVYYCARKDWFDYWGQGTLVTVSS

SEQ ID NO: 140 - protein, 107 aa, Artificial Sequence
  Light Chain Sequence
EIVLTQSPGTLSLSPGERATLSCRASQSVSSYLAWYQQKPGQAPRLLIYGASSRATGIPDRFSGSGSGTDFTLTISRLEPEDFAVYYCQQYGSSPLTFGGGTKVEIK

SEQ ID NO: 141 - protein, 116 aa, Artificial Sequence
  Heavy Chain Sequence
EVQLVESGGGLVQPGGSLRLSCAASGFTFSSYMMSWVRQAPGKGLEWVATISGGGANTYYPDSVKGRFTISRDNAKNSLYLQMNSLRAEDTAVYYCARQLYYFDYWGQGTTVTVSS

SEQ ID NO: 142 - protein, 107 aa, Artificial Sequence
  Light Chain Sequence
DIQMTQSPSSLSASVGDRVTITCLASQTIGTWLTWYQQKPGKAPKLLIYTATSLADGVPSRFSGSGSGTDFTLTISSLQPEDFATYYCQQVYSIPWTFGGGTKVEIK

SEQ ID NO: 143 - protein, 118 aa, Artificial Sequence [sequence omitted]

SEQ ID NO: 144 - protein, 107 aa, Artificial Sequence [sequence omitted]

SEQ ID NO: 145 - protein, 119 aa, Artificial Sequence
  Heavy Chain Sequence
QVQLVQSGAEVKKPGETVKISCKASDYTFTYYGMNWVKQAPGQGLKWMGWIDTTTGEPTYAQKFQGRIAFSLETSASTAYLQIKSLKSEDTATYFCARRGPYNWYFDVWGQGTTVTVSS

SEQ ID NO: 146 - protein, 112 aa, Artificial Sequence
  Light Chain Sequence
DIVMTQSPLSVPVTPGEPVSISCRSSKSLLHSNGNTYLYWFLQRPGQSPQLLIYRMSNLVSGVPDRFSGSGSGTAFTLRISRVEAEDVGVYYCLQHLEYPFTFGPGTKLELK

SEQ ID NO: 147 - protein, 128 aa, Artificial Sequence
  Heavy Chain Sequence
EVQLVESGGGLVQPGGSLRLSCAASGRTFSYNPMGWFRQAPGKGRELVAAISRTGGSTYYPDSVEGRFTISRDNAKRMVYLQMNSLRAEDTAVYYCAAAGVRAEDGRVRTLPSEYTFWGQGTQVTVSS

SEQ ID NO: 148 - protein, 119 aa, Artificial Sequence
  Heavy Chain Sequence
QVQLVQSGAEVKKPGSSVKVSCKASGGTFSSYGISWVRQAPGQGLEWMGGIIPIFGTANYAQKFQGRVTITADESTSTAYMELSSLRSEDTAVYYCARYDGIYGELDFWGQGTLVTVSS

SEQ ID NO: 149 - protein, 109 aa, Artificial Sequence
  Light Chain Sequence
EIVLTQSPATLSLSPGERATLSCRASQSVSDAYLAWYQQKPGQAPRLLIYDASSRATGVPARFSGSGSGTDFTLTISSLEPEDFAVYYCHQYIQLHSFTFGQGTKVEIK

SEQ ID NO: 150 - protein, 118 aa, Artificial Sequence
  Heavy Chain Sequence
EVKLEESGGGLVQPGGSMKLSCAASGFTFSDAWMDWVRQSPEKGLEWVAEIRSKASNHATYYAESVKGRFTISRDDSKSSVYLQMNSLRAEDTGIYYCTRWRRFFDSWGQGTTLTVSS

SEQ ID NO: 151 - protein, 106 aa, Artificial Sequence
  Light Chain Sequence
QIVLSQSPAILSASPGEKVTMTCRASSSVSYMHWYQQKPGSSPKPWIYATSNLASGVPVRFSGSGSGTSYSLTISRVEAEDAATYYCQQWSSNPLTFGAGTKLELK

SEQ ID NO: 152 - protein, 117 aa, Artificial Sequence [sequence omitted]

SEQ ID NO: 153 - protein, 107 aa, Artificial Sequence [sequence omitted]

SEQ ID NO: 154 - protein, 123 aa, Artificial Sequence
  Heavy Chain Sequence
EVTLRESGPGLVKPTQTLTLTCTLYGFSLSTSDMGVDWIRQPPGKGLEWLAHIWWDDVKRYNPALKSRLTISKDTSKNQVVLKLTSVDPVDTATYYCARTVSSGYIYYAMDYWGQGTLVTVSS

SEQ ID NO: 155 - protein, 107 aa, Artificial Sequence
  Light Chain Sequence
DIQMTQSPSSLSASVGDRVTISCRASQDIRNYLNWYQQKPGKAPKLLIFYTSKLHSGVPSRFSGSGSGTDYTLTISSLQPEDIATYYCQQGNTLPLTFGGGTKVEIK

SEQ ID NO: 156 - protein, 121 aa, Artificial Sequence
  Heavy Chain Sequence
QVQLVQSGAEVKKPGASVKVSCKASGYTFTEFGMNWVRQAPGQGLEWMGWINTKTGEATYVEEFKGRVTFTTDTSTSTAYMELRSLRSDDTAVYYCARWDFAYYVEAMDYWGQGTTVTVSS

SEQ ID NO: 157 - protein, 108 aa, Artificial Sequence
  Light Chain Sequence
DIQMTQSPSSLSASVGDRVTITCKASAAVGTYVAWYQQKPGKAPKLLIYSASYRKRGVPSRFSGSGSGTDFTLTISSLQPEDFATYYCHQYYTYPLFTFGQGTKLEIK

SEQ ID NO: 158 - protein, 118 aa, Artificial Sequence
  Heavy Chain Sequence
EVQLVESGGGLVQPGGSLRLSCAASGYVFTDYGMNWVRQAPGKGLEWMGWINTYIGEPIYADSVKGRFTFSLDTSKSTAYLQMNSLRAEDTAVYYCARGYRSYAMDYWGQGTLVTVSS

SEQ ID NO: 159 - protein, 107 aa, Artificial Sequence
  Light Chain Sequence
DIQMTQSPSSLSASVGDRVTITCKASQNVGTNVAWYQQKPGKAPKALIYSASFLYSGVPYRFSGSGSGTDFTLTISSLQPEDFATYYCQQYNIYPLTFGQGTKVEIK

SEQ ID NO: 160 - protein, 123 aa, Artificial Sequence
  Heavy Chain Sequence
QVQLVQSGAEVKKPGSSVKVSCKASGGTFSSYAISWVRQAPGQGLEWMGGIIPIFDTANYAQKFQGRVTITADESTSTAYMELSSLRSEDTAVYYCARPGLAAAYDTGSLDYWGQGTLVTVSS

SEQ ID NO: 161 - protein, 107 aa, Artificial Sequence
  Light Chain Sequence
EIVLTQSPATLSLSPGERATLSCRASQSVRSYLAWYQQKPGQAPRLLIYDASNRATGIPARFSGSGSGTDFTLTISSLEPEDFAVYYCQQRNYWPLTFGQGTKVEIK

SEQ ID NO: 162 - protein, 119 aa, Artificial Sequence
  Heavy Chain Sequence
QVQLKQSGPGLVQPSQSLSITCTVSGFSLTNYGVHWVRQSPGKGLEWLGVIWSGGNTDYNTPFTSRLSINKDNSKSQVFFKMNSLQSNDTAIYYCARALTYYDYEFAYWGQGTLVTVSA

SEQ ID NO: 163 - protein, 107 aa, Artificial Sequence
  Light Chain Sequence
DILLTQSPVILSVSPGERVSFSCRASQSIGTNIHWYQQRTNGSPRLLIKYASESISGIPSRFSGSGSGTDFTLSINSVESEDIADYYCQQNNNWPTTFGAGTKLELK

SEQ ID NO: 164 - protein, 121 aa, Artificial Sequence; identical to SEQ ID NO: 156
  Heavy Chain Sequence

SEQ ID NO: 165 - protein, 108 aa, Artificial Sequence; identical to SEQ ID NO: 157
  Light Chain Sequence

SEQ ID NO: 166 - protein, 121 aa, Artificial Sequence; identical to SEQ ID NO: 156
  Heavy Chain Sequence (if bispec)

SEQ ID NO: 167 - protein, 109 aa, Artificial Sequence
  Light Chain Sequence (if bispec)
QAVVTQEPSLTVSPGGTVTLTCGSSTGAVTTSNYANWVQEKPGQAFRGLIGGTNKRAPGTPARFSGSLLGGKAALTLSGAQPEDEAEYYCALWYSNLWVFGGGTKLTVL

SEQ ID NO: 168 - protein, 113 aa, Artificial Sequence
  Heavy Chain Sequence
EVQLVESGGGLVEPGGSLRLSCAVSGFDFEKAWMSWVRQAPGQGLQWVARIKSTADGGTTSYAAPVEGRFIISRDDSRNMLYLQMNSLKTEDTAVYYCTSAHWGQGTLVTVSS

SEQ ID NO: 169 - protein, 108 aa, Artificial Sequence
  Light Chain Sequence
SYELTQPPSVSVSPGQTARITCSGEALPMQFAHWYQQRPGKAPVIVVYKDSERPSGVPERFSGSSSGTTATLTITGVQAEDEADYYCQSPDSTNTYEVFGGGTKLTVL

SEQ ID NO: 170 - protein, 116 aa, Artificial Sequence
  Heavy Chain Sequence
EVQLVQSGPGLVQPGGSVRISCAASGYTFTNYGMNWVKQAPGKGLEWMGWINTYTGESTYADSFKGRFTFSLDTSASAAYLQINSLRAEDTAVYYCARFAIKGDYWGQGTLLTVSS

SEQ ID NO: 171 - protein, 112 aa, Artificial Sequence
  Light Chain Sequence
DIQMTQSPSSLSASVGDRVTITCRSTKSLLHSNGITYLYWYQQKPGKAPKLLIYQMSNLASGVPSRFSSSGSGTDFTLTISSLQPEDFATYYCAQNLEIPRTFGQGTKVELK

SEQ ID NO: 172 - protein, 130 aa, Artificial Sequence
  Heavy Chain Sequence
EVQLVQSGAEVKKPGSSVKVSCKASGGTFSSYAISWVRQAPGQGLEWMGGIIPIFGTANYAQKFQGRVTITADKSTSTAYMELSSLRSEDTAVYYCARAPLRFLEWSTQDHYYYYYMDVWGKGTTVTVSS

SEQ ID NO: 173 - protein, 108 aa, Artificial Sequence
  Light Chain Sequence
SSELTQDPAVSVALGQTVRITCQGDSLRSYYATWYQQKPGQAPILVIYGENKRPSGIPDRFSGSSSGNTASLTITGAQAEDEADYYCKSRDGSGQHLVFGGGTKLTVL

SEQ ID NO: 174 - protein, 120 aa, Artificial Sequence
  Heavy Chain Sequence
EVQLVESGGGLVQPGGSLRLSCAASGFSLSNYYVTWVRQAPGKGLEWVGIIYGSDETAYATSAIGRFTISRDNSKNTLYLQMNSLRAEDTAVYYCARDDSSDWDAKFNLWGQGTLVTVSS

SEQ ID NO: 175 - protein, 110 aa, Artificial Sequence
  Light Chain Sequence
AIQMTQSPSSLSASVGDRVTITCQASQSINNELSWYQQKPGKAPKLLIYRASTLASGVPSRFSGSGSGTDFTLTISSLQPDDFATYYCQQGYSLRNIDNAFGGGTKVEIK

SEQ ID NO: 176 - protein, 116 aa, Artificial Sequence
  Heavy Chain Sequence
EVQLQESGGGVVQPGGSLRLSCAASGFTFSNYGMHWIRQAPGKGLEWVSYISSGSSTIYYADSVKGRFTISRDNSKNTLYLQMNSLRSEDTAVYYCARRGLLLDYWGQGTLVTVSS

SEQ ID NO: 177 - protein, 105 aa, Artificial Sequence
  Light Chain Sequence
DIQMTQSPSSLSASVGDRVTISCRASKSVSTSSYSYMHWYQQKPEKALIKYASYLQSGVPSRFSGSGSGTDFTLTISSLQPEDVATYYCQHSRETFGAGTKLELK

SEQ ID NO: 178 - protein, 119 aa, Artificial Sequence
  Heavy Chain Sequence
QVQLQQSGAEVKKPGASVKVSCEASGYTFPSYVLHWVKQAPGQGLEWIGYINPYNDGTQYNEKFKGKATLTRDTSINTAYMELSRLRSDDTAVYYCARGFGGSYGFAYWGQGTLVTVSS

SEQ ID NO: 179 - protein, 108 aa, Artificial Sequence
  Light Chain Sequence
DIQLTQSPSSLSASVGDRVTMTCSASSSVSSSYLYWYQQKPGKAPKLWIYSTSNLASGVPARFSGSGSGTDFTLTISSLQPEDSASYFCHQWNRYPYTFGGGTRLEIK

SEQ ID NO: 180 - protein, 113 aa, Artificial Sequence
  Heavy Chain Sequence
EVQLLESGGGLVQPGGSLRLSCAAASGFTFSSYDMSWVRQAPGKGLDWVSTISGGGTYTYYQDSVKGRFTISRDNSKNTLYLQMNSLRAEDTAVYYCASMDYWGQGTTVTVSS

SEQ ID NO: 181 - protein, 107 aa, Artificial Sequence
  Light Chain Sequence
DIQMTQSPSSLSASVGDRVTITCRASQSIRRYLNWYHQKPGKAPKLLIYGASTLQSGVPSRFSGSGSGTDFTLTISSLQPEDFAVYYCQQSHSAPLTFGGGTKVEIK

SEQ ID NO: 182 - protein, 115 aa, Artificial Sequence
  Heavy Chain Sequence
QVQLVQSGAEVKKPGASVKVSCKASGYTFTDYEMHWVRQAPGQGLEWMGALDPKTGDTAYSQKFKGRVTLTADKSTSTAYMELSSLTSEDTAVYYCTRFYSYTYWGQGTLVTVSS

SEQ ID NO: 183 - protein, 112 aa, Artificial Sequence
  Light Chain Sequence
DVVMTQSPLSLPVTPGEPASISCRSSQSLVHSNRNTYLHWYLQKPGQSPQLLIYKVSNRFSGVPDRFSGSGSGTDFTLKISRVEAEDVGVYYCSQNTHVPPTFGQGTKLEIK

SEQ ID NO: 184 - protein, 119 aa, Artificial Sequence
  Heavy Chain Sequence
QVQLVQSGPEVKKPGASVKVSCKASGYTFTDYAVHWVRQAPGKRLEWIGVISTYNDYTYNNQDFKGRVTMTRDTSASTAYMELSRLRSEDTAVYYCARGNSYFYALDYWGQGTSVTVSS

SEQ ID NO: 185 - protein, 111 aa, Artificial Sequence
  Light Chain Sequence
EIVLTQSPATLSLSPGERATLSCRASESVDSYGKSFMHWYQQKPGQAPRLLIYRASNLESGIPARFSGSGSGTDFTLTISSLEPEDFAVYYCQQSNEDPWTFGGGTKLEIK

SEQ ID NO: 186 - protein, 120 aa, Artificial Sequence
  Heavy Chain Sequence
QVQLVQPGAEVVKPGASVKLSCKTSGYTFTSNWMHWVKQAPGQGLEWIGEIDPSDSYTNYNQNFQGKAKLTVDKSTSTAYMEVSSLRSDDTAVYYCARGSNPYYYAMDYWGQGTSVTVSS

SEQ ID NO: 187 - protein, 104 aa, Artificial Sequence
  Light Chain Sequence
EIVLTQSPAIMSASPGERVTMTCSASSGVNYMHWYQQKPGTSPRRWIYDTSKLASGVPARFSGSGSGTDYSLTISSMEPEDAATYYCHQRGSYTFGGGTKLEIK

SEQ ID NO: 188 - protein, 122 aa, Artificial Sequence
  Heavy Chain Sequence
QVQLQESGPGLVKPSQTLSLTCTVSGGSISSGDYFWSWIRQLPGKGLEWIGHIHNSGTTYYNPSLKSRVTISVDTSKKQFSLRLSSVTAADTAVYYCARDRGGDYYYGMDVWGQGTTVTVSS

SEQ ID NO: 189 - protein, 108 aa, Artificial Sequence
  Light Chain Sequence
EIVLTQSPGTLSLSPGERATLSCRASQGISRSYLAWYQQKPGQAPSLLIYGASSRATGIPDRFSGSGSGTDFTLTISRLEPEDFAVYYCQQFGSSPWTFGQGTKVEIK

SEQ ID NO: 190 - protein, 121 aa, Artificial Sequence [sequence omitted]

SEQ ID NO: 191 - protein, 112 aa, Artificial Sequence [sequence omitted]

SEQ ID NO: 192 - protein, 122 aa, Artificial Sequence
  Heavy Chain Sequence
DVKLLESGGGLVQPGGSLKLSCAASGFSLSTSGVGVGWFRQPSGKGLEWLALIWWDDDKYYNPSLKSQLSISKDFSRNQVFLKISNVDIADTATYYCARRDPFGYDNAMGYWGQGTSVTVSS

SEQ ID NO: 193 - protein, 107 aa, Artificial Sequence
  Light Chain Sequence
DIVMTQSPLSLSTSVGDRVSLTCKASQNVGTAVAWYQQKPGQSPKLLIYSASNRYTGVPDRFTGSGSGTDFTLTISNMQSEDLADYFCQQYSSYPLTFGAGTKLELR

SEQ ID NO: 194 - protein, 112 aa, Artificial Sequence
  Heavy Chain Sequence
EVQLVESGGGLVQPGGSLRLSCAASGFTFSSYGMSWVRQAPGKGLELVASINSNGGSTYYPDSVKGRFTISRDNAKNSLYLQMNSLRAEDTAVYYCASGDYWGQGTTVTVSS

SEQ ID NO: 195 - protein, 112 aa, Artificial Sequence
  Light Chain Sequence
DIVMTQSPLSLPVTPGEPASISCRSSQSLVYSNGDTYLHWYLQKPGQSPQLLIYKVSNRFSGVPDRFSGSGSGTDFTLKISRVEAEDVGVYYCSQSTHVPWTFGQGTKVEIK

SEQ ID NO: 196 - protein, 122 aa, Artificial Sequence
  Heavy Chain Sequence
QVQLVQSGAEVKKPGASVKVSCKVSGYTFTSYDINWVRQAPGKGLEWMGWIYPGDGSIKYNEKFKGRVTMTVDKSTDTAYMELSSLRSEDTAVYYCARRGEYGNYEGAMDYWGQGTLVTVSS

SEQ ID NO: 197 - protein, 111 aa, Artificial Sequence
  Light Chain Sequence
DIQMTQSPSSLSASVGDRVTITCKASQSVDYDGHSYMNWYQQKPGKAPKLLIYAASNLESGVPSRFSGSGSGTDFTLTISSLQPEDFATYYCQQSDENPLTFGGGTKVEIK

SEQ ID NO: 198 - protein, 128 aa, Artificial Sequence
  Heavy Chain Sequence
EVQLVESGGGLVQPGGSLRLSCAASGFTFSNYLMNWVRQAPGKGLEWLANIQEDGIEKYYVDSVKGRFTISRDNAKNSLYLQMNSLRAEDTAVYYCAREPSHYDILTGYDYYYGMDVWGQGTTVTVSS

SEQ ID NO: 199 - protein, 107 aa, Artificial Sequence
  Light Chain Sequence
DIQMTQSPSSLSASVGDRVTITCRASQGIRNDLGWYQQKPGKAPKRLIYAASSLQSGVPSRFSGSGSGTEFILTVSSLQPEDFATYYCLQYNSNPFTFGPGTKVDIK

SEQ ID NO: 200 - protein, 123 aa, Artificial Sequence [sequence omitted]

SEQ ID NO: 201 - protein, 110 aa, Artificial Sequence [sequence omitted]

SEQ ID NO: 202 - protein, 122 aa, Artificial Sequence
  Heavy Chain Sequence
EVQLVESGGGLVQPGGSLRLSCAASGFTFSVYYMNWVRQAPGKGLEWVSDINNEGGTTYYADSVKGRFTISRDNSKNSLYLQMNSLRAEDTAVYYCARDAGYSNHVPIFDSWGQGTLVTVSS

SEQ ID NO: 203 - protein, 110 aa, Artificial Sequence
  Light Chain Sequence
QAVVTQEPSLTVSPGGTVTLTCGLKSGSVTSDNFPTWYQQTPGQAPRLLIYNTNTRHSGVPDRFSGSILGNKAALTITGAQADDEAEYFCALFISNPSVEFGGGTQLTVL

SEQ ID NO: 204 - protein, 114 aa, Artificial Sequence [sequence omitted]

SEQ ID NO: 205 - protein, 112 aa, Artificial Sequence [sequence omitted]

SEQ ID NO: 206 - protein, 116 aa, Artificial Sequence
  Heavy Chain Sequence
QVQLVQSGAEVKKPGSSVKVSCKASGYTFTSYRMHWVRQAPGQGLEWIGYINPSTGYTEYNQKFKDKATITADESTNTAYMELSSLRSEDTAVYYCARGGGVFDYWGQGTLVTVSS

SEQ ID NO: 207 - protein, 106 aa, Artificial Sequence
  Light Chain Sequence
DIQMTQSPSTLSASVGDRVTITCSASSSISYMHWYQQKPGKAPKLLIYTTSNLASGVPARFSGSGSGTEFTLTISSLQPDDFATYYCHQRSTYPLTFGQGTKVEVK

SEQ ID NO: 208 - protein, 117 aa, Artificial Sequence [sequence omitted]

SEQ ID NO: 209 - protein, 112 aa, Artificial Sequence [sequence omitted]

SEQ ID NO: 210 - protein, 118 aa, Artificial Sequence
  Heavy Chain Sequence
EVQLVESGGGLVQPGGSLRLSCAVSGFSSTNYHVHWVRQAPGKGLEWMGVIWGDGDTSYNSVLKSRFTISRDTSKNTVYLQMNSLRAEDTAVYYCARQLTHYYVLAAWGQGTLVTVSS

SEQ ID NO: 211 - protein, 107 aa, Artificial Sequence
  Light Chain Sequence
DIQMTQSPSSLSASVGDRVTITCRASEDLYYNLAWYQRKPGKAPKLLIYDTYRLADGVPSRFSGSGSGTDYTLTISSLQPEDFASYYCQQYYKFPFTFGQGTKVEIK

SEQ ID NO: 212 - protein, 122 aa, Artificial Sequence [sequence omitted]

SEQ ID NO: 213 - protein, 107 aa, Artificial Sequence [sequence omitted]

SEQ ID NO: 214 - protein, 120 aa, Artificial Sequence
  Heavy Chain Sequence
EVQLVESGGGVVQPGRSLRLSCAASGFTFSSYGMHWVRQAPGKGLEWVAIIWYDGSNKYYADSVKGRFTISRDNSKNTLYLQMNSLRAEDTAVYYCARLWFGDLDAFDIWGQGTMVTVSS

SEQ ID NO: 215 - protein, 109 aa, Artificial Sequence
  Light Chain Sequence
EIVLTQSPATLSLSPGERAILSCRAGQSVSSYLVWYQQKPGQAPRLLIYDASNRATGIPARFSGSGSGTDFTLTISSLEPEDFAVYYCQQRSSWPPVYTFGQGTKLEIK

SEQ ID NO: 216 - protein, 119 aa, Artificial Sequence
  Heavy Chain Sequence
QVQLVQSGAEVKKPGASVKISCKASGYSFTAYYIHWVKQAPGQGLEWIGYISSYNGATNYNQKFKGRVTFTTDTSTSTAYMELRSLRSDDTAVYYCARDYDYDVGMDYWGQGTLVTVSS

SEQ ID NO: 217 - protein, 111 aa, Artificial Sequence
  Light Chain Sequence
DIVMTQSPDSLAVSLGERATISCRASESVDNYGISFMKWFQQKPGQPPKLLIYAASNQGSGVPDRFSGSGSGTDFTLTISSLQAEDVAVYYCQQSKEVPWTFGGGTKVEIK

SEQ ID NO: 218 - protein, 120 aa, Artificial Sequence
  Heavy Chain Sequence
QVQLQESGPGLVKPSQTLSLTCTVSGGSISTSGMGVGWIRQHPGKGLEWIGHIWWDDDKRYNPALKSRVTISVDTSKNQFSLKLSSVTAADTAVYYCARMELWSYYFDYWGQGTLVTVSS

SEQ ID NO: 219 - protein, 106 aa, Artificial Sequence
  Light Chain Sequence
EIVLTQSPATLSLSPGERATLSCSASSSVSYMHWYQQKPGQAPRLLIYDTSKLASGIPARFSGSGSGTDFTLTISSLEPEDVAVYYCFQGSVYPFTFGQGTKLEIK

SEQ ID NO: 220 - protein, 122 aa, Artificial Sequence
  Heavy Chain Sequence
EVQLLESGGGLVQPGGSLRLSCAASGFTFSSYAMSWVRQAPGKGLEWVSGITGSGGSTYYADSVKGRFTISRDNSKNTLYLQMNSLRAEDTAVYYCAKDPGTTVIMSWFDPWGQGTLVTVSS

SEQ ID NO: 221 - protein, 108 aa, Artificial Sequence
  Light Chain Sequence
EIVLTQSPGTLSLSPGERATLSCRASQSVRGRYLAWYQQKPGQAPRLLIYGASSRATGIPDRFSGSGSGTDFTLTISRLEPEDFAVFYCQQYGSSPRTFGQGTKVEIK

SEQ ID NO: 222 - protein, 116 aa, Artificial Sequence
  Heavy Chain Sequence
QVQLQESGPGLVKPSQTLSLTCTVSGYSISSDFAWNWIRQPPGKGLEWMGYISYSGNTRYQPSLKSRITISRDTSKNQFFLKLNSVTAADTATYYCVTAGRGFPYWGQGTLVTVSS

SEQ ID NO: 223 - protein, 107 aa, Artificial Sequence
  Light Chain Sequence
DIQMTQSPSSMSVSVGDRVTITCHSSQDINSNIGWLQQKPGKSFKGLIYHGTNLDDGVPSRFSGSGSGTDYTLTISSLQPEDFATYYCVQYAQFPWTFGGGTKLEIK

SEQ ID NO: 224 - protein, 120 aa, Artificial Sequence
  Heavy Chain Sequence
QVQLKESGPGLVAPSQSLSITCTVSGFSLTDYGVRWIRQPPGKGLEWLGVIWGGGSTYYNSALKSRLSISKDNSKSQVFLKMNSLQTDDTAMYYCAKEKRRGYYYAMDYWGQGTSVTVSS

SEQ ID NO: 225 - protein, 108 aa, Artificial Sequence
  Light Chain Sequence
ENVLTQSPAIMSASPGEKVTMTCRASSSVSSSYLHWYQQKSGASPKLWIYSTSNLASGVPARFSGSGSGTSYSLTISSVEAEDAATYYCQQYSGYPLTFGGGTKLEIK

SEQ ID NO: 226 - protein, 122 aa, Artificial Sequence
  Heavy Chain Sequence
QVQLVQSGAEVKKPGSSVKVSCKASGFTFATYNMHWVRQAPGQGLEWMGYIYPGDGNANYNQQFKGRVTITADKSTSTAYMELSSLRSEDTAVYYCARGDFDYDGGYYFDSWGQGTLVTVSS

SEQ ID NO: 227 - protein, 107 aa, Artificial Sequence
  Light Chain Sequence
DIQMTQSPSSLSASVGDRVTITCRASENIYSYLAWYQQKPGKAPKLLIHNAKTLAEGVPSRFSGSGSGTDFTLTISSLQPEDFATYYCQHHYGAPLTFGQGTKLEIK

SEQ ID NO: 228 - protein, 118 aa, Artificial Sequence
  Heavy Chain Sequence
EVQLVESGGGLVQPGGSLRLSCAASGFTFSNFPMAWVRQAPGKGLEWVATISSSDGTTYYRDSVKGRFTISRDNAKNSLYLQMNSLRAEDTAVYYCARGYYNSPFAYWGQGTLVTVSS

SEQ ID NO: 229 - protein, 107 aa, Artificial Sequence
  Light Chain Sequence
DIQMTQSPSSLSASVGDRVTITCRASEDIYSNLAWYQQKPGKAPKLLIYDTNNLADGVPSRFSGSGSGTDFTLTISSLQPEDFATYYCQQYNNYPPTFGQGTKLEIK

SEQ ID NO: 230 - protein, 123 aa, Artificial Sequence [sequence omitted]

SEQ ID NO: 231 - protein, 107 aa, Artificial Sequence [sequence omitted]

SEQ ID NO: 232 - protein, 113 aa, Artificial Sequence [sequence omitted]

SEQ ID NO: 233 - protein, 113 aa, Artificial Sequence [sequence omitted]

SEQ ID NO: 234 - protein, 121 aa, Artificial Sequence [sequence omitted]

SEQ ID NO: 235 - protein, 111 aa, Artificial Sequence [sequence omitted]

SEQ ID NO: 236 - protein, 115 aa, Artificial Sequence
  Heavy Chain Sequence
EVQLVQSGAEVKKPGATVKISCKVSGYTFTDYYIHWVQQAPGKGLEWMGRVNPDHGDSYYNQKFKDKATITADKSTDTAYMELSSLRSEDTAVYFCARNYLFDHWGQGTLVTVSS

SEQ ID NO: 237 - protein, 105 aa, Artificial Sequence
  Light Chain Sequence
DIQMTQSPSSVSASVGDRVTITCKASQDVGTAVAWYQQKPGKAPKLLIYWASIRHTGVPSRFSGSGSGTDFTLTISSLQPEDFATYYCHQFATYTFGGGTKVEIK

SEQ ID NO: 238 - protein, 116 aa, Artificial Sequence
  Heavy Chain Sequence
EVQLLESGGGLVQPGGSLRLSCAASGFTFSSYAMSWVRQAPGKGLEWVSTISSGGSYTSYPDSVKGRFTISRDNSKNTLYLQMNSLRAEDTAVYYCAKQDYAMNYWGQGTLVTVSS

SEQ ID NO: 239 - protein, 107 aa, Artificial Sequence
  Light Chain Sequence
DIQMTQSPSSLSASVGDRVTITCKASQDVSTAVAWYQQKPGKAPKLLIYSASYRYTGVPSRFSGSGSGTDFTLTISSLQPEDFATYYCQQHYSTPWTFGGGTKVEIK

SEQ ID NO: 240 - protein, 115 aa, Artificial Sequence
  Heavy Chain Sequence
QVQLVQSGAEVKKPGSSVKVSCKASGYDFTRYYINWVRQAPGQGLEWMGWINPGSGNTKYNEKFKGRVTITADESTSTAYMELSSLRSEDTAVYYCAREGITVYWGQGTTVTVSS

SEQ ID NO: 241 - protein, 112 aa, Artificial Sequence
  Light Chain Sequence
DIVMTQTPLSLSVTPGQPASISCKSSQSLLYSRGKTYLNWLLQKPGQSPQLLIYAVSKLDSGVPDRFSGSGSGTDFTLKISRVEAEDVGVYYCVQGTHYPFTFGQGTKLEIK

SEQ ID NO: 242 - protein, 116 aa, Artificial Sequence
  Heavy Chain Sequence
EVQLLESGGGLVQPGGSLRLSCAASGFTFSSYDMSWVRQAPGKGLEWVSTISGGGSYTYYQDSVKGRFTISRDNSKNTLYLQMNSLRAEDTAVYYCASPYYAMDYWGQGTTVTVSS

SEQ ID NO: 243 - protein, 107 aa, Artificial Sequence
  Light Chain Sequence
DIQLTQSPSFLSAYVGDRVTITCKASQDVGTAVAWYQQKPGKAPKLLIYWASTLHTGVPSRFSGSGSGTEFTLTISSLQPEDFATYYCQHYSSYPWTFGQGTKLEIK

SEQ ID NO: 244 - protein, 121 aa, Artificial Sequence [sequence omitted]

SEQ ID NO: 245 - protein, 107 aa, Artificial Sequence [sequence omitted]

SEQ ID NO: 246 - protein, 121 aa, Artificial Sequence [sequence omitted]

SEQ ID NO: 247 - protein, 107 aa, Artificial Sequence [sequence omitted]

SEQ ID NO: 248 - protein, 125 aa, Artificial Sequence [sequence omitted]

SEQ ID NO: 249 - protein, 112 aa, Artificial Sequence [sequence omitted]

SEQ ID NO: 250 - protein, 121 aa, Artificial Sequence
  Heavy Chain Sequence
EVQLVESGGGLVQPGGSLRLSCAASGFTFSRYWMSWVRQAPGKGLEWVANIKQDGSEKYYVDSVKGRFTISRDNAKNSLYLQMNSLRAEDTAVYYCAREGGWFGELAFDYWGQGTLVTVSS

SEQ ID NO: 251 - protein, 108 aa, Artificial Sequence
  Light Chain Sequence
EIVLTQSPGTLSLSPGERATLSCRASQRVSSSYLAWYQQKPGQAPRLLIYDASSRATGIPDRFSGSGSGTDFTLTISRLEPEDFAVYYCQQYGSLPWTFGQGTKVEIK

SEQ ID NO: 252 - protein, 120 aa, Artificial Sequence
  Heavy Chain Sequence
QVQLVQSGAEVKKPGASVKVSCKASGYTFTSYDINWVRQATGQGLEWMGWMNPNSGNTGYAQKFQGRVTMTRNTSISTAYMELSSLRSEDTAVYYCARDPYYYYYGMDVWGQGTTVTVSS

SEQ ID NO: 253 - protein, 111 aa, Artificial Sequence
  Light Chain Sequence
QSVLTQPPSVSAAPGQKVTISCSGSSSNIENNHVSWYQQLPGTAPKLLIYDNNKRPSGIPDRFSGSKSGTSATLGITGLQTGDEADYYCETWDTSLSAGRVFGGGTKLTVL

SEQ ID NO: 254 - protein, 120 aa, Artificial Sequence
  Heavy Chain Sequence
QVTLRESGPALVKPTQTLTLTCTFSGFSLSTSGMGVGWIRQPPGKALEWLAHIWWDDDKRYNPALKSRLTISKDTSKNQVFLTMTNMDPVDTATYYCARMELWSYYFDYWGQGTTVTVSS

SEQ ID NO: 255 - protein, 106 aa, Artificial Sequence
  Light Chain Sequence
ENVLTQSPATLSVTPGEKATITCRASQSVSYMHWYQQKPGQAPRLLIYDASNRASGVPSRFSGSGSGTDHTLTISSLEAEDAATYYCFQGSVYPFTFGQGTKLEIK

SEQ ID NO: 256 - protein, 125 aa, Artificial Sequence
  Heavy Chain Sequence (if bispec)
EVQLVESGGGLVQPGGSLRLSCAASGFTFSTYAMNWVRQAPGKGLEWVGRIRSKYNNYATYYADSVKGRFTISRDDSKNSLYLQMNSLKTEDTAVYYCVRHGNFGNSYVSWFAYWGQGTLVTVSS

SEQ ID NO: 257 - protein, 109 aa, Artificial Sequence
  Light Chain Sequence (if bispec)
QAVVTQEPSLTVSPGGTVTLTCRSSTGAVTTSNYANWVQQKPGQAPRGLIGGTNKRAPWTPARFSGSLLGGKAALTITGAQAEDEADYYCALWYSNLWVFGGGTKLTVL

SEQ ID NO: 258 - protein, 122 aa, Artificial Sequence [sequence omitted]

SEQ ID NO: 259 - protein, 107 aa, Artificial Sequence [sequence omitted]

SEQ ID NO: 260 - protein, 116 aa, Artificial Sequence
  Heavy Chain Sequence
QVQLQQSGAELVRPGTSVKVSCKASGYAFTNYLIEWVKQRPGQGLEWIGVINPGSGGTNYNEKFKGKATLTADKSSSTAYMQLSSLTSDDSAVYFCARDGPWFAYWGQGTLVTVSA

SEQ ID NO: 261 - protein, 107 aa, Artificial Sequence
  Light Chain Sequence
NIVMTQSPKSMSMSVGERVTLTCKASENVVTYVSWYQQKPEQSPKLLIYGASNRYTGVPDRFTGSGSATDFTLTISSVQAEDLADYHCGQGYSYPYTFGGGTKLEIK

SEQ ID NO: 262 - protein, 121 aa, Artificial Sequence [sequence omitted]

SEQ ID NO: 263 - protein, 107 aa, Artificial Sequence [sequence omitted]

SEQ ID NO: 264 - protein, 122 aa, Artificial Sequence
  Heavy Chain Sequence
MAEVQLVESGAEVKKPGESLRISCKGSGCIISSYWISWVRQMPGKGLEWMGKIDPGDSYINYSPSFQGHVTISADKSINTAYLQWNSLKASDTAMYYCARGGRDFGDSFDYWGQGTLVTVSS

SEQ ID NO: 265 - protein, 107 aa, Artificial Sequence
  Light Chain Sequence
DVVMTQSPSFLSAFVGDRITITCRASSGISRYLAWYQQAPGKAPKLLIYAASTLQTGVPSRFSGSGSGTEFTLTINSLQPEDFATYYCQHLNSYPLTFGGGTKVDIK

SEQ ID NO: 266 - protein, 124 aa, Artificial Sequence
  Heavy Chain Sequence
QMQLVESGGGVVQPGRSLRLSCTASGFTFSNNGMHWVRQAPGKGLEWVAVIWFDGMNKFYVDSVKGRFTISRDNSKNTLYLEMNSLRAEDTAIYYCAREGDGSGIYYYYGMDVWGQGTTVTVSS

SEQ ID NO: 267 - protein, 109 aa, Artificial Sequence
  Light Chain Sequence
EIVLTQSPGTLSLSPGERATLSCRASQSVSSSYLAWYQQKPGQAPRLLIYGASSRATGIPDRFSGSGSGTDFTLTISRLEPEDFAVYYCQQYGSSPIFTFGPGTKVDIK

SEQ ID NO: 268 - protein, 120 aa, Artificial Sequence
  Heavy Chain Sequence
EVQLVQSGAEVKKPGASVKVSCKASGYTFTSHGISWVRQAPGQGLDWMGWISPYSGNTNYAQKLQGRVTMTTDTSTSTAYMELSSLRSEDTAVYYCARVGSGPYYYMDVWGQGTLVTVSS

SEQ ID NO: 269 - protein, 109 aa, Artificial Sequence
  Light Chain Sequence
QSALTQPRSVSGSPGQSVTISCTGTSSSVGDSIYVSWYQQHPGKAPKLMLYDVTKRPSGVPDRFSGSKSGNTASLTISGLQAEDEADYYCYSYAGTDTLFGGGTKVTVL

SEQ ID NO: 270 - protein, 117 aa, Artificial Sequence
  Heavy Chain Sequence
EVQLLESGGGLVQPGGSLRLSCAASGFTFSSYAMSWVRQAPGKGLEWVSAINSQGKSTYYADSVKGRFTISRDNSKNTLYLQMNSLRAEDTAVYYCARWGDEGFDIWGQGTLVTVSS

SEQ ID NO: 271 - protein, 107 aa, Artificial Sequence
  Light Chain Sequence
DIQMTQSPSSLSASVGDRVTITCRASQGISNWLAWYQQKPGKAPKLLIYGASSLQSGVPSRFSGSGSGTDFTLTISSLQPEDFATYYCQQYSSFPTTFGQGTKVEIK

SEQ ID NO: 272 - protein, 132 aa, Artificial Sequence
  Heavy Chain Sequence
QMQLQESGPGLVKPSETLSLTCSVSGASISDSYWSWIRRSPGKGLEWIGYVHKSGDTNYNPSLKSRVHLSLDTSKNQVSLSLTGVTAADSGKYYCARTLHGRRIYGIVAFNEWFTYFYMDVWGTGTQVTVSS

SEQ ID NO: 273 - protein, 105 aa, Artificial Sequence
  Light Chain Sequence
SDISVAPGETARISCGEKSLGSRAVQWYQHRAGQAPSLIIYNNQDRPSGIPERFSGSPDSRPGTTATLTITSVEAGDEADYYCHIWDSRVPTKWVFGGGTTLTVL

SEQ ID NO: 274 - protein, 119 aa, Artificial Sequence
  Heavy Chain Sequence
EVQLVESGGGLVQPGGSLRLSCAASGFDFSRYWMSWVRQAPGKGLEWIGEINPDSSTINYAPSLKDKFIISRDNAKNSLYLQMNSLRAEDTAVYYCARPDGNYWYFDVWGQGTLVTVSS

SEQ ID NO: 275 - protein, 107 aa, Artificial Sequence
  Light Chain Sequence
DIQMTQSPSSLSASVGDRVTITCKASQDVGIAVAWYQQKPGKVPKLLIYWASTRHTGVPDRFSGSGSGTDFTLTISSLQPEDVATYYCQQYSSYPYTFGQGTKVEIK

SEQ ID NO: 276 - protein, 116 aa, Artificial Sequence
  Heavy Chain Sequence
QVQLVQSGAEVKKPGASVKVSCKASGYTFTSYDISWVRQAPGQGLEWMGVIWTDGGTNYAQKLQGRVTMTTDTSTSTAYMELRSLRSDDTAVYYCARDQRLYFDVWGQGTTVTVSS

SEQ ID NO: 277 - protein, 106 aa, Artificial Sequence
  Light Chain Sequence
DIQMTQSPSSLSASVGDRVTITCRASEDVNTYVSWYQQKPGKAPKLLIYAASNRYTGVPSRFSGSGSGTDFTLTISSLQPEDFATYYCQQSFSYPTFGQGTKLEIK

SEQ ID NO: 278 - protein, 123 aa, Artificial Sequence
  Heavy Chain Sequence
EVQLLESGGGLVQPGGSLRLSCAASGFTFSSYAMSWVRQAPGKGLEWVSAISGSGGSTYYADSVKGRFTISRDNSKNTLYLQMNSLRAEDTAVYYCAKDGSSGWYVPHWFDPWGQGTLVTVSS

SEQ ID NO: 279 - protein, 111 aa, Artificial Sequence
  Light Chain Sequence
NFMLTQPHSVSESPGKTVTISCTRSSGSIASNYVQWYQQRPGSSPTTVIYEDNQRPSGVPDRFSGSIDSSSNSASLTISGLKTEDEADYYCQSYDGSNRWMFGGGTKLTVL

SEQ ID NO: 280 - protein, 119 aa, Artificial Sequence
  Heavy Chain Sequence
QVQLVQSGSELKKPGASVKVSCKASGYTFTDNNMDWVRQAPGQGLEWMGDINTRSGGSIYNEEFQDRVIMTVDKSTDTAYMELSSLRSEDTATYHCARRKSYGYYLDEWGEGTLVTVSS

SEQ ID NO: 281 - protein, 107 aa, Artificial Sequence
  Light Chain Sequence
DIQMTQSPSSLSASVGDRVTITCKASRNIERQLAWYQQKPGQAPELLIYQASRKESGVPDRFSGSRYGTDFTLTISSLQPEDIATYYCQQYSDPPLTFGGGTKVEIK

SEQ ID NO: 282 - protein, 123 aa, Artificial Sequence
  Heavy Chain Sequence (if bispec)
QVQLVESGGGLVQPGGSLRLSCAASGFTFSYYDIQWVRQAPGKGLEWVSSISPSGQSTYYRREVKGRFTISRDNSKNTLYLQMNSLRAEDTAVYYCARRTGREYGGGWYFDYWGQGTLVTVSS

SEQ ID NO: 283 - protein, 107 aa, Artificial Sequence; identical to SEQ ID NO: 281
  Light Chain Sequence (if bispec)

SEQ ID NO: 284 - protein, 115 aa, Artificial Sequence [sequence omitted]

SEQ ID NO: 285 - protein, 108 aa, Artificial Sequence [sequence omitted]

SEQ ID NO: 286 - protein, 116 aa, Artificial Sequence
  Heavy Chain Sequence
EVQLLESGGGLVQPGGSLRLSCAASGFTFSSYAMNWVRQAPGKGLEWVSTTSGSGASTYYADSVKGRFTISRDNSKNTLYLQMNSLRAEDTAVYYCAKIWIAFDIWGQGTMVTVSS

SEQ ID NO: 287 - protein, 108 aa, Artificial Sequence
  Light Chain Sequence
EIVLTQSPGTLSLSPGERATLSCRASQSVSSSYLAWYQQKPGQAPRLLIYGASSRATGIPDRFSGSGSGTDFTLTISRLEPEDFAVYYCQQYGSSPYTFGQGTKLEIK

SEQ ID NO: 288 - protein, 119 aa, Artificial Sequence
  Heavy Chain Sequence
EVQLVESGGGLVQPGGSLRLSCAASGFTFSSYWMSWVRQAPGKGLEWVAEIRLKSDNYATHYAESVKGRFTISRDDSKNSLYLQMNSLRAEDTAVYYCTGYYADAMDYWGQGTLVTVSS

SEQ ID NO: 289 - protein, 111 aa, Artificial Sequence
  Light Chain Sequence
DIQMTQSPSSLSASVGDRVTITCRASQSVSTSSYSYMHWYQQKPGKAPKLLIKYASNLESGVPSRFSGSGSGTDFTLTISSLQPEDFATYYCQHSWEIPYTFGGGTKVEIK

SEQ ID NO: 290 - protein, 117 aa, Artificial Sequence
  Heavy Chain Sequence
EVQLVESGGGLVQPGGSLRLSCAASGFTFSSYNMNWVRQAPGKGLEWVSYISSSSSTIYYADSVKGRFTISRDNAKNSLSLQMNSLRDEDTAVYYCARAYYYGMDVWGQGTTVTVSS

SEQ ID NO: 291 - protein, 107 aa, Artificial Sequence
  Light Chain Sequence
DIQMTQSPSSVSASVGDRVTITCRASQGISGWLAWYQQKPGKAPKFLIYAASTLQSGVPSRFSGSGSGTDFTLTISSLQPEDFATYYCQQANSFPPTFGGGTKVEIK

SEQ ID NO: 292 - protein, 122 aa, Artificial Sequence
  Heavy Chain Sequence
EVQLVESGGGLVQPGGSLRLSCAASGFTFSSFGMHWVRQAPGKGLEWVAYISSDSSAIYYADTVKGRFTISRDNAKNSLYLQMNSLRDEDTAVYYCGRGRENIYYGSRLDYWGQGTTVTVSS

SEQ ID NO: 293 - protein, 107 aa, Artificial Sequence
  Light Chain Sequence
DIQLTQSPSFLSASVGDRVTITCKASQNVDTNVAWYQQKPGKAPKALIYSASYRYSGVPSRFSGSGSGTDFTLTISSLQPEDFATYYCQQYNNYPFTFGQGTKLEIK

SEQ ID NO: 294 - protein, 122 aa, Artificial Sequence
  Heavy Chain Sequence
QVQLVQSGAEVKKPGSSVKVSCKASGGTFSYYWIEWVRQAPGQGLEWMGEILPGSGTTNPNEKFKGRVTITADESTSTAYMELSSLRSEDTAVYYCARADYYGSDYVKFDYWGQGTLVTVSS

SEQ ID NO: 295 - protein, 107 aa, Artificial Sequence
  Light Chain Sequence
DIQMTQSPSSLSASVGDRVTITCKASQHVITHVTWYQQKPGKAPKLLIYGTSYSYSGVPSRFSGSGSGTDFTLTISSLQPEDFATYYCQQFYEYPLTFGGGTKVEIK

SEQ ID NO: 296 - protein, 123 aa, Artificial Sequence
  Heavy Chain Sequence
QVQLVESGGGVVQPGRSLRLSCAASGFTFSSYGMHWVRQAPGKGLEWVSFLWYDGTNKNYVESVKGRFTISRDNSKNMLYLEMNSLRAEDTAVYYCARDHDFRSGYEGWFDPWGQGTLVTVSS

SEQ ID NO: 297 - protein, 107 aa, Artificial Sequence
  Light Chain Sequence
EIVLTQSPATLSLSPGERATLSCRASQSVSSYLAWYQQKPGQAPRLLIYDASNRATGIPARFSGSGSGTDFTLTISSLEPEDFAVYYCQHRSNWPPTFGGGTKVEIK

SEQ ID NO: 298 - protein, 113 aa, Artificial Sequence
  Heavy Chain Sequence
QVQLKESGPDLVAPSQSLSITCTVSGFSLSKFGVNWVRQPPGKGLEWLGVIWGDGSTSYNSGLISRLSISKENSKSQVFLKLNSLQADDTATYYCVKPGGDYWGHGTSVTVSS

SEQ ID NO: 299 - protein, 106 aa, Artificial Sequence
  Light Chain Sequence
QVVLTQSPVIMSASPGEKVTMTCSASSSISYMYWYQQKPGTSPKRWIYDTSKLASGVPARFSGSGSGTSYSLTISNMEAGDAATYYCHQRDSYPWTFGGGTNLEIK

SEQ ID NO: 300 - protein, 112 aa, Artificial Sequence
  Heavy Chain Sequence
QVQLVESGGGLVQPGGSLRLSCAASGKMSSRRCMAWFRQAPGKERERVAKLLTTSGSTYLADSVKGRFTISRDNSKNTVYLQMNSLRAEDTAVYYCAADSFEDPTCTLVTSS

SEQ ID NO: 301 - protein, 116 aa, Artificial Sequence [sequence omitted]

SEQ ID NO: 302 - protein, 112 aa, Artificial Sequence [sequence omitted]

SEQ ID NO: 303 - protein, 111 aa, Artificial Sequence
  Heavy Chain Sequence
EVQLVESGGGLVQPGGSLRLSCAVSGIDLSGYYMNWVRQAPGKGLEWVGVIGINGATYYASWAKGRFTISRDNSKTTVYLQMNSLRAEDTAVYFCARGDIWGQGTLVTVSS

SEQ ID NO: 304 - protein, 112 aa, Artificial Sequence
  Light Chain Sequence
QVLTQSPSSLSASVGDRVTINCQASQSVYHNTYLAWYQQKPGKVPKQLIYDASTLASGVPSRFSGSGSGTDFTLTISSLQPEDVATYYCLGSYDCTNGDCFVFGGGTKVEIK

SEQ ID NO: 305 - protein, 130 aa, Artificial Sequence [sequence omitted]

SEQ ID NO: 306 - protein, 110 aa, Artificial Sequence
  Light Chain Sequence
QSVLTQPPSVSAAPGQKVTISCSGSSSNIGNNYVSWYQQLPGTAPKLLIYDNNKRPSGIPDRFSGSKSGTSTTLGITGLQTGDEADYYCGTWDSRLSAVVFGGGTKLTVL

SEQ ID NO: 307 - protein, 117 aa, Artificial Sequence
  Heavy Chain Sequence
QVQLVESGGGVVQPGRSLRLSCAASGFTFSSYDMSWVRQAPGKGLEWVAKVSSGGGSTYYLDTVQGRFTISRDNSKNTLYLQMNSLRAEDTAVYYCARHLHGSFASWGQGTTVTVSS

SEQ ID NO: 308 - protein, 107 aa, Artificial Sequence
  Light Chain Sequence
EIVLTQSPATLSLSPGERATLSCQASQSISNFLHWYQQRPGQAPRLLIRYRSQSISGIPARFSGSGSGTDFTLTISSLEPEDFAVYYCQQSGSWPLTFGGGTKVEIK

SEQ ID NO: 309 - protein, 118 aa, Artificial Sequence
  Heavy Chain Sequence
QVQLQESGPGLVKPSETLSLTCAVSGYSITSDYAWNWIRQPPGKGLEWIGYISYSGSTSYNPSLRSRVTISRDTSKNQFFLKLSSVTAADTAVYYCARRQVGLGFAYWGQGTLVTVSS

SEQ ID NO: 310 - protein, 107 aa, Artificial Sequence
  Light Chain Sequence
DIQMTQSPSSLSASVGDRVTITCKASQDVSTAVAWYQQKPGKAPKLLIYSASYRYTGVPSRFSGSGSGTDFTFTISSLQPEDIATYYCQQHYSTPWTFGQGTKVEIK

SEQ ID NO: 311 - protein, 122 aa, Artificial Sequence
  Heavy Chain Sequence
QVQLMQSGAEVKKPGASVKVSCKASGYTFTSYWMHWVRQAPGQGLEWMGTIYPRNSNTDYNQKFKARVTMTRDTSTSTVYMELSSLRSEDTAVYYCARPLYYYLTSPPTLFWGQGTLVTVSS

SEQ ID NO: 312 - protein, 107 aa, Artificial Sequence
  Light Chain Sequence
DIQLTQSPSFLSASVGDRVTITCKASQDVGTAVAWYQQKPGKAPKLLIYWASTRHTGVPSRFSGSGSGTEFTLTISSLQPEDFATYYCQQAKTYPFTFGSGTKLEIK

SEQ ID NO: 313 - protein, 117 aa, Artificial Sequence [sequence omitted]

SEQ ID NO: 314 - protein, 107 aa, Artificial Sequence [sequence omitted]

SEQ ID NO: 315 - protein, 126 aa, Artificial Sequence
  Heavy Chain Sequence
EVQLVESGGGVIQPGGSLRLSCAASGFTFDDYAMNWVRQGPGKGLEWVSAISGDGGSTYYADSVKGRFTISRDNSKNSLYLQMNSLRAEDTAFFYCAKDLRNTIFGVVIPDAFDIWGQGTMVTVSS

SEQ ID NO: 316 - protein, 107 aa, Artificial Sequence
  Light Chain Sequence
DIQMTQSPSTLSASVGDRVTITCRASQSIRSWLAWYQQKPGKAPKLLIYKASSLESGVPSRFSGSGSGTEFTLTISSLQPDDFATYYCQQYNSYSYTFGQGTKLEIK

SEQ ID NO: 317 - protein, 115 aa, Artificial Sequence [sequence omitted]

SEQ ID NO: 318 - protein, 109 aa, Artificial Sequence [sequence omitted]

SEQ ID NO: 319 - protein, 123 aa, Artificial Sequence [sequence omitted]

SEQ ID NO: 320 - protein, 107 aa, Artificial Sequence [sequence omitted]

SEQ ID NO: 321 - protein, 129 aa, Artificial Sequence
  Heavy Chain Sequence (if bispec)
QVQLVQSGAEVKKPGASVKVSCKASGYTFTGYYMHWVRQAPGQGLEWMGWINPNSGGTNYAQKFQGRVTMTRDTSISTAYMELSRLRSDDTAVYYCARSPNPYYYDSSGYYYPGAFDIWGQGTMVTVSS

SEQ ID NO: 322 - protein, 108 aa, Artificial Sequence
  Light Chain Sequence (if bispec)
SYVLTQPPSVSVAPGQTARITCGGNNIGSKSVHWYQQKPGQAPVLVVYDDSDRPSGIPERFSGSNSGNTATLTISRVEAGDEADYYCQVWDSSSDHWVFGGGTKLTVL

SEQ ID NO: 323 - protein, 119 aa, Artificial Sequence
  Heavy Chain Sequence
EVQLVESGGGVVQPGRSLRLSCSASGFTFSGYGLSWVRQAPGKGLEWVAMISSGGSYTYYADSVKGRFAISRDNAKNTLFLQMDSLRPEDTGVYFCARHGDDPAWFAYWGQGTPVTVSS

SEQ ID NO: 324 - protein, 110 aa, Artificial Sequence
  Light Chain Sequence
DIQLTQSPSSLSASVGDRVTITCSVSSSISSNNLHWYQQKPGKAPKPWIYGTSNLASGVPSRFSGSGSGTDYTFTISSLQPEDIATYYCQQWSSYPYMYTFGQGTKVEIK

SEQ ID NO: 325 - protein, 119 aa, Artificial Sequence [sequence omitted]

SEQ ID NO: 326 - protein, 107 aa, Artificial Sequence [sequence omitted]

SEQ ID NO: 327 - protein, 121 aa, Artificial Sequence
  Heavy Chain Sequence
QVQLVQSGAEVKKPGASVKVSCKASGYTFTNYYMHWVRQAPGQGLEWVGWINPYTGSAFYAQKFRGRVTMTRDTSISTAYMELSRLRSDDTAVYYCAREPEKFDSDDSDVWGRGTLVTVSS

SEQ ID NO: 328 - protein, 111 aa, Artificial Sequence
  Light Chain Sequence
QAVLTQPPSVSGAPGQRVTISCTGSSSNIGAGYGVHWYQQLPGTAPKLLIYGDSNRPSGVPDRFSGSKSGTSASLAITGLQAEDEADYYCQSYDNSLSGYVFGGGTQLTVL

SEQ ID NO: 329 - protein, 118 aa, Artificial Sequence
  Heavy Chain Sequence
QVQLVQPGAEVKKPGTSVKLSCKASGYTFTTYWMHWVRQAPGQGLEWIGEINPTNGHTNYNQKFQGRATLTVDKSTSTAYMELSSLRSEDTAVYYCARNYVGSIFDYWGQGTLLTVSS

SEQ ID NO: 330 - protein, 107 aa, Artificial Sequence
  Light Chain Sequence
DIVMTQSPDSLAMSLGERVTLNCKASENVVSYVSWYQQKPGQSPKLLIYGASNRESGVPDRFSGSGSATDFTLTISSVQAEDVADYHCGQSYNYPYTFGQGTKLEIK

SEQ ID NO: 331 - protein, 125 aa, Artificial Sequence [sequence omitted]

SEQ ID NO: 332 - protein, 107 aa, Artificial Sequence [sequence omitted]

SEQ ID NO: 333 - protein, 123 aa, Artificial Sequence
  Heavy Chain Sequence
QVQLVQSGAEVKMPGSSVKVSCKTSGVFFSSHAISWVRQAPGQGLEWMGGISPMFGTTHYAQKFQGRVTITADQSTTTAYMELTSLTSEDTAVYYCARDGAGSYYPLNWFDPWGQGTLVTVSS

SEQ ID NO: 334 - protein, 107 aa, Artificial Sequence
  Light Chain Sequence
EIVLTQSPATLSLSPGERATLSCRASENIWNNLAWYQQKPGQAPRLLISGASTGATGVPSRFRGSGSRTEFTLTISSLQSEDFAIYFCQQYNSWPRTFGPGTKVEIK

SEQ ID NO: 335 - protein, 119 aa, Artificial Sequence
  Heavy Chain Sequence
QVQLVQSGSELKKPGASVKISCKASGYTFTSYAMNWVRQAPGQGLESMGWINTNTGNPTYAQGFTGRFVFSMDTSVSTAYLQISSLKAEDTAIYYCAPRYSSSWYLDYWGQGTLVTVSS

SEQ ID NO: 336 - protein, 108 aa, Artificial Sequence
  Light Chain Sequence
EIVLTQSPATLSLSPGERATLSCRASQSVSSYLAWYQQKPGQAPRLLIYDASNRATGIPARFSGSGSGTDFTLTISSLEPEDFAVYYCQQRSNWLMYTFGQGTKLEIK

SEQ ID NO: 337 - protein, 127 aa, Artificial Sequence [sequence omitted]

SEQ ID NO: 338 - protein, 107 aa, Artificial Sequence [sequence omitted]

SEQ ID NO: 339 - protein, 120 aa, Artificial Sequence
  Heavy Chain Sequence
EVQLVQSGAELKKPGASVKVSCKASGYTFTDYYMKWVRQAPGQGLEWIGDIIPSNGATFYNQKFKGRVTITVDKSTSTAYMELSSLRSEDTAVYYCARSHLLRASWFAYWGQGTLVTVSS

SEQ ID NO: 340 - protein, 113 aa, Artificial Sequence
  Light Chain Sequence
DFVMTQSPDSLAVSLGERVTMSCKSSQSLLNSGNQKNYLTWYQQKPGQPPKLLIYWASTRESGVPDRFSGSGSGTDFTLTISSLQAEDVAVYYCQNDYSYPYTFGQGTKLEIK

SEQ ID NO: 341 - protein, 125 aa, Artificial Sequence
  Heavy Chain Sequence (if bispec)
EVQLVESGGGLVQPGGSLRLSCAASGFTFSTYAMNWVRQAPGKGLEWVGRIRSKYNNYATYYADSVKDRFTISRDDSKNSLYLQMNSLKTEDTAVYYCVRHGNFGNSYVSWFAYWGQGTLVTVSS

SEQ ID NO: 342 - protein, 109 aa, Artificial Sequence; identical to SEQ ID NO: 257
  Light Chain Sequence (if bispec)

SEQ ID NO: 343 - protein, 117 aa, Artificial Sequence
  Heavy Chain Sequence
QVQLVQSGAELKKPGSSVKVSCKASGYIFTSSWINWVKQAPGQGLEWIGRIDPSDGEVHYNQDFKDKATLTVDKSTNTAYMELSSLRSEDTAVYYCARGFLPWFADWGQGTLVTVSS

SEQ ID NO: 344 - protein, 107 aa, Artificial Sequence
  Light Chain Sequence
DIQMTQSPSTLSASVGDRVTITCKASENVDTYVSWYQQKPGKAPKLLIYGASNRYTGVPSRFSGSGSGTDFTLTISSLQPDDFATYYCGQSYNYPFTFGQGTKVEVK

SEQ ID NO: 345 - protein, 118 aa, Artificial Sequence [sequence omitted]

SEQ ID NO: 346 - protein, 108 aa, Artificial Sequence [sequence omitted]

SEQ ID NO: 347 - protein, 119 aa, Artificial Sequence
  Heavy Chain Sequence
QVQLVESGGGAVQPGRSLRLSCAASGFTFSSYGMHWVRQAPGKGLEWVAVILYDGSDKFYADSVKGRFTISRDNSKNTLYLQMNSLRAEDTAVYYCAKVAVAGTHFDYWGQGTLVTVSS

SEQ ID NO: 348 - protein, 107 aa, Artificial Sequence
  Light Chain Sequence
DIQMTQSPSSLSASVGDRVTITCRASQGIRNDLGWYQQKPGKAPKLLIYAASSLQSGVPSRFSGSGSGTDFTLTISSLQPEDFATYYCQQLNSYPPTFGGGTKVEIK

SEQ ID NO: 349 - protein, 122 aa, Artificial Sequence
  Heavy Chain Sequence
EVQLVESGGGLVQPGGSLRLSCAASGFTFSNYWISWVRQAPGKGLEWVAEIRSESDASATHYAEAVKGRFTISRDNAKNSLYLQMNSLRAEDTAVYYCLAYFDYGLAIQNYWGQGTLVTVSS

SEQ ID NO: 350 - protein, 107 aa, Artificial Sequence
  Light Chain Sequence
EIVLTQSPATLSLSPGERATLSCKASKRVTTYVSWYQQKPGQAPRLLIYGASNRYLGIPARFSGSGSGTDFTLTISSLEPEDFAVYYCSQSYNYPYTFGQGTKLEIK

SEQ ID NO: 351 - protein, 120 aa, Artificial Sequence
  Heavy Chain Sequence
QVQLVQSGAEVKKPGSSVKVSCKASGYTFSSNVISWVRQAPGQGLEWMGGVIPIVDIANYAQRFKGRVTITADESTSTTYMELSSLRSEDTAVYYCASTLGLVLDAMDYWGQGTLVTVSS

SEQ ID NO: 352 - protein, 108 aa, Artificial Sequence
  Light Chain Sequence
ETVLTQSPGTLSLSPGERATLSCRASQSLGSSYLAWYQQKPGQAPRLLIYGASSRAPGIPDRFSGSGSGTDFTLTISRLEPEDFAVYYCQQYADSPITFGQGTRLEIK

SEQ ID NO: 353 - protein, 125 aa, Artificial Sequence
  Heavy Chain Sequence
EVQLVESGGGLVKPGGSLRLSCAASGFPFSKLGMVWVRQAPGKGLEWVSTISSGGGYTYYPDSVKGRFTISRDNAKNSLYLQMNSLRAEDTAVYYCAREGISFQGGTYTYVMDYWGQGTLVTVSS

SEQ ID NO: 354 - protein, 112 aa, Artificial Sequence
  Light Chain Sequence
DIVMTQSPLSLPVTPGEPASISCRSSKSLLHRNGITYSYWYLQKPGQSPQLLIYQLSNLASGVPDRFSGSGSGTDFTLKISRVEAEDVGVYYCYQNLELPLTFGQGTKVEIK

SEQ ID NO: 355 - protein, 122 aa, Artificial Sequence
  Heavy Chain Sequence
QVQLVESGAELVQPGESLRLTCAASGFSLTNNNVNWVRQAPGKGLEWMGGVWAGGATDYNSALKSRLTITRDTSKNTVFLQMHSLQSEDTATYYCARDGGYSSSTLYAMDAWGQGTTVTVSA

SEQ ID NO: 356 - protein, 107 aa, Artificial Sequence
  Light Chain Sequence
DIEMTQSPLSLSVTPGESVSISCRASEDIYNALAWYLQKPGRSPRLLIYNTDTLHTGVPDRFSGSGSGTDFTLKISRVQTEDVGVYFCQHYFHYPRTFGQGTKLELK

SEQ ID NO: 357 - protein, 123 aa, Artificial Sequence
  Heavy Chain Sequence
EVQLVESGGGLVQPGGSLRLSCAASGFTLRSYSMNWVRQAPGKGLEWVSYISRSSHTIFYADSVKGRFTISRDNAKNSLYLQMDSLRDEDTAMYYCARVYSSGWHVSDYFDYWGQGILVTVSS

SEQ ID NO: 358 - protein, 107 aa, Artificial Sequence [sequence omitted]

SEQ ID NO: 359 - protein, 123 aa, Artificial Sequence
  Heavy Chain Sequence
EVQLQQPGSELVRPGASVKLSCKASGYTFTSYWMHWVKQRPGQGLEWIGNIYPGSRSTNYDEKFKSKATLTVDTSSSTAYMQLSSLTSEDSAVYYCTRNGDYYVSSGDAMDYWGQGTSVTVSS

SEQ ID NO: 360 - protein, 107 aa, Artificial Sequence
  Light Chain Sequence
DIQMTQTTSSLSASLGDRVTISCRTSQDIGNYLNWYQQKPDGTVKLLIYYTSRLHSGVPSRFSGSGSGTDFSLTINNVEQEDVATYFCQHYNTVPPTFGGGTKLEIK

SEQ ID NO: 361 - protein, 119 aa, Artificial Sequence
  Heavy Chain Sequence
QVQLVQSGAEVKKPGSSVKVSCKASGYTFGNYWMQWVRQAPGQGLEWMGAIYEGTGKTVYIQKFADRVTITADKSTSTAYMELSSLRSEDTAVYYCARLSDYVSGFGYWGQGTTVTVSS

SEQ ID NO: 362 - protein, 107 aa, Artificial Sequence
  Light Chain Sequence
DIQMTQSPSSLSASVGDRVTITCRASKDISKYLNWYQQKPGKAPKLLIYYTSGYHSGVPSRFSGSGSGTDFTLTISSLQPEDFATYYCQQGDALPPTFGGGTKVEIK

SEQ ID NO: 363 - protein, 127 aa, Artificial Sequence [sequence omitted]

SEQ ID NO: 364 - protein, 110 aa, Artificial Sequence [sequence omitted]

SEQ ID NO: 365 - protein, 119 aa, Artificial Sequence
  Heavy Chain Sequence
QVQLVESGGGLVQPGGSLRLSCAASGFTFRSYAMSWVRQAPGKGLEWVSAISGRGDNTYYADSVKGRFTISRDNSKNTLYLQMNSLRAEDTAVYYCAKMTSNAFAFDYWGQGTLVTVSS

SEQ ID NO: 366 - protein, 111 aa, Artificial Sequence
  Light Chain Sequence
QSVLTQPPSVSGAPGQRVTISCTGSSSNIGAGYGVHWYQQLPGTAPKLLIYGNTNRPSGVPDRFSGFKSGTSASLAITGLQAEDEADYYCQSYDSSLSGWVFGGGTKLTVL

SEQ ID NO: 367 - protein, 119 aa, Artificial Sequence [sequence omitted]

SEQ ID NO: 368 - protein, 112 aa, Artificial Sequence [sequence omitted]

SEQ ID NO: 369 - protein, 126 aa, Artificial Sequence [sequence omitted]

SEQ ID NO: 370 - protein, 108 aa, Artificial Sequence [sequence omitted]

SEQ ID NO: 371 - protein, 129 aa, Artificial Sequence
  Heavy Chain Sequence
EVQLLESGGGLVQPGGSLRLSCAASGFTFSKYIMQWVRQAPGKGLEWVSGIDIPTKGTVYADSVKGRFTISRDNSKNTLYLQMNSLRAEDTAVYYCARALPRSGYLISPHYYYYALDVWGQGTTVTVSS

SEQ ID NO: 372 - protein, 109 aa, Artificial Sequence
  Light Chain Sequence
QSVLTQPPSASGTPGQRVTISCSGSSSNIGRNYVYWYQQLPGTAPKLLIYSNNQRPSGVPDRFSGSKSGTSASLAISGLRSEDEADYYCAAWDASLRGVFGGGTKLTVL

SEQ ID NO: 373 - protein, 126 aa, Artificial Sequence
  Heavy Chain Sequence
QVQLQESGPGLVKPSETLSLTCTVSGGSFSSHFWSWIRQPPGKGLEWIGYILYTGGTSFNPSLKSRVSMSVGTSKNQFSLKLSSVTAADTAVYYCARARSGITFTGIIVPGSFDIWGQGTMVTVSS

SEQ ID NO: 374 - protein, 108 aa, Artificial Sequence
  Light Chain Sequence
EIVLTQSPGTLSLSPGERATLSCRASQSVSSSYLAWYQQKPGQAPRLLIYGASSRATGIPDRFSGSGSGTDFTLTISRLEPEDFAVYYCQQYGSSPWTFGQGTKVEIK

SEQ ID NO: 375 - protein, 117 aa, Artificial Sequence
  Heavy Chain Sequence
EVQLVESGGGLVQPGGSMRLSCVASGFPFSNYWMNWVRQAPGKGLEWVGEIRLKSNNYTTHYAESVKGRFTISRDDSKNSLYLQMNSLKTEDTAVYYCTRHYYFDYWGQGTLVTVSS

SEQ ID NO: 376 - protein, 112 aa, Artificial Sequence
  Light Chain Sequence
DIVMTQSPLSNPVTPGEPASISCRSSKSLLHSNGITYFFWYLQKPGQSPQLLIYQMSNLASGVPDRFSGSGSGTDFTLRISRVEAEDVGVYYCAQNLELPPTFGQGTKVEIK

SEQ ID NO: 377 - protein, 125 aa, Artificial Sequence
  Heavy Chain Sequence
EVQLVESGGGVVQPGKSLRLSCAASGLTFSSYAVHWVRQAPGKGLEWVTLISYDGANQYYADSVKGRFTISRDNSKNTVYLQMNSLRPEDTAVYYCAVPGPVFGIFPPWSYFDNWGQGILVTVSS

SEQ ID NO: 378 - protein, 109 aa, Artificial Sequence
  Light Chain Sequence
EIVLTQSPATLSVSPGERATLSCRASQVISHNLAWYQQKPGQAPRLLIYGASTRASGIPARFSGSGSGTDYTLTITSLQSEDFAVYYCQHYSNWPPRLTFGGGTKVEIK

SEQ ID NO: 379 - protein, 116 aa, Artificial Sequence [sequence omitted]

SEQ ID NO: 380 - protein, 111 aa, Artificial Sequence [sequence omitted]

SEQ ID NO: 381 - protein, 120 aa, Artificial Sequence [sequence omitted]

SEQ ID NO: 382 - protein, 107 aa, Artificial Sequence [sequence omitted]

SEQ ID NO: 383 - protein, 120 aa, Artificial Sequence
  Heavy Chain Sequence
EVQLVQSGGDLVKPGGSVRLSCVASGFNIKNTYMHWVRQAPGKGLQWIGRIAPANVDTKYAPKFQGKATISADTAKNTAYMQLNSLRAEDTAVYYCVLIYYDYDGDIDVWGQGTLVTVSS

SEQ ID NO: 384 - protein, 107 aa, Artificial Sequence
  Light Chain Sequence
DIVMTQTPLSLSVSLGEPASISCHASQNINVWLSWYRQKPGQIPQLLIYKASHLHTGVPDRFSGSGSGTDFTLRISRVEADDAGVYYCQQGQSWPLTFGQGTKVEIK

SEQ ID NO: 385 - protein, 121 aa, Artificial Sequence
  Heavy Chain Sequence
EVQLVESGGGLVQPGGSLRLSCAASGFTFSRHWMHWLRQVPGKGPVWVSRINGAGTSITYADSVRGRFTISRDNANNTLFLQMNSLRADDTALYFCARANSVWFRGLFDYWGQGTPVTVSS

SEQ ID NO: 386 - protein, 107 aa, Artificial Sequence
  Light Chain Sequence
EIVLTQSPVTLSVSPGERVTLSCRASQSVSTNLAWYQQKLGQGPRLLIYGASTRATDIPARFSGSGSETEFTLTISSLQSEDFAVYYCQQYDKWPDTFGQGTKLEIK

SEQ ID NO: 387 - protein, 119 aa, Artificial Sequence
  Heavy Chain Sequence
DVKLVESGGGLVKLGGSLKLSCAASGFTFSNYYMSWVRQTPEKRLELVAAINSDGGITYYLDTVKGRFTISRDNAKNTLYLQMSSLKSEDTALFYCARHRSGYFSMDYWGQGTSVTVSS

SEQ ID NO: 388 - protein, 107 aa, Artificial Sequence
  Light Chain Sequence
DIVMTQSQRFMSTTVGDRVSITCKASQNVVSAVAWYQQKPGQSPKLLIYSASNRYTGVPDRFTGSGSGTDFTLTISNMQSEDLADFFCQQYSNYPWTFGGGTKLEIK

SEQ ID NO: 389 - protein, 119 aa, Artificial Sequence [sequence omitted]

SEQ ID NO: 390 - protein, 108 aa, Artificial Sequence [sequence omitted]

SEQ ID NO: 391 - protein, 120 aa, Artificial Sequence
  Heavy Chain Sequence
QVQLVQSGAEVKKPGASVKVSCKASGYTFTSYNMHWVRQAPGQGLEWMGGIYPGNGDTSYNQKFQGRVTMTRDTSTSTVYMELSSLRSEDTAVYYCARGTVVGDWYFDVWGQGTLVTVSS

SEQ ID NO: 392 - protein, 112 aa, Artificial Sequence
  Light Chain Sequence
DIQMTQSPSSLSASVGDRVTITCRSSQSLENSNGNTYLNWYQQKPGKAPKLLIYRVSNRFSGVPSRFSGSGSGRDFTFTISSLQPEDIATYYCLQLTHVPWTFGQGTKVEIT

SEQ ID NO: 393 - protein, 126 aa, Artificial Sequence
  Heavy Chain Sequence
QVQLVESGGGVVQPGRSLRLSCAASGFIFSSYAMHWVRQAPGNGLEWVAFMSYDGSNKKYADSVKGRFTISRDNSKNTLYLQMNSLRAEDTAVYYCARDRGIAAGGNYYYYGMDVWGQGTTVTVSS

SEQ ID NO: 394 - protein, 108 aa, Artificial Sequence
  Light Chain Sequence
EIVLTQSPATLSLSPGERATLSCRASQSVYSYLAWYQQKPGQAPRLLIYDASNRATGIPARFSGSGSGTDFTLTISSLEPEDFAVYYCQQRSNWPPFTFGPGTKVDIK

SEQ ID NO: 395 - protein, 117 aa, Artificial Sequence
  Heavy Chain Sequence
EVHLVESGGALVKPGGSLRLSCAASGFSFSKYGMSWVRQAPGKGLEWVATISSSGSRTYYPDSVKGRFTISRDNAKNTLYLQMNSLRAEDTAMYYCSISWDGAMDYWGQGTTVTVSS

SEQ ID NO: 396 - protein, 112 aa, Artificial Sequence
  Light Chain Sequence
DVVMTQSPLSLPVTLGQPASISCKSSQSIVHSNGNTYLEWYLQKPGQSPQLLVYKVSNRFSGVPDRFSGSGSGTDFTLKISRVEAEDVGTYYCFQGSLVPWAFGGGTKVEIK

SEQ ID NO: 397 - protein, 117 aa, Artificial Sequence
  Heavy Chain Sequence
EVQLVQSGAEVKKPGESLKISCKGSGYSFSNYWIGWVRQMPGKGLEWMGIIDPSNSYTRYSPSFQGQVTISADKSISTAYLQWSSLKASDTAMYYCARWYYKPFDVWGQGTLVTVSS

SEQ ID NO: 398 - protein, 111 aa, Artificial Sequence
  Light Chain Sequence
QSVLTQPPSVSGAPGQRVTISCTGSSSNIGSGYDVHWYQQLPGTAPKLLIYGNSKRPSGVPDRFSGSKSGTSASLAITGLQSEDEADYYCASWTDGLSLVVFGGGTKLTVL

SEQ ID NO: 399 - protein, 124 aa, Artificial Sequence
  Heavy Chain Sequence
QVQLQQSGPGLVKPSQTLSLTCAISGDSVSSNSAAWGWIRQSPGRGLEWLGRIYYRSKWYNSYAVSVKSRITINPDTSKNQFSLQLNSVTPEDTAVYYCARYQWVPKIGVFDSWGQGTLVTVSS

SEQ ID NO: 400 - protein, 108 aa, Artificial Sequence
  Light Chain Sequence
DIVLTQSPATLSLSPGERATLSCRASQFILPEYLSWYQQKPGQAPRLLIYGSSSRATGVPARFSGSGSGTDFTLTISSLEPEDFAVYYCQQFYSSPLTFGQGTKVEIK

SEQ ID NO: 401 - protein, 122 aa, Artificial Sequence
  Heavy Chain Sequence
QVQLQQSGPEVVKPGASVKMSCKASGYTFTSYVIHWVRQKPGQGLDWIGYINPYNDGTDYDEKFKGKATLTSDTSTSTAYMELSSLRSEDTAVYYCAREKDNYATGAWFAYWGQGTLVTVSS

SEQ ID NO: 402 - protein, 112 aa, Artificial Sequence
  Light Chain Sequence
DIVMTQSPDSLAVSLGERVTMNCKSSQSLLYSTNQKNYLAWYQQKPGQSPKLLIYWASTRESGVPDRFSGSGSGTDFTLTISSVQAEDVAVYYCQQYYSYRTFGGGTKLEIK

SEQ ID NO: 403 - protein, 126 aa, Artificial Sequence
  Heavy Chain Sequence
QAQVVESGGGVVQSGRSLRLSCAASGFAFSSYGMHWVRQAPGKGLEWVAVIWYDGSNKYYADSVRGRFTISRDNSENTLYLQMNSLRAEDTAVYYCARDHYGSGVHHYFYYGLDVWGQGTTVTVSS

SEQ ID NO: 404 - protein, 108 aa, Artificial Sequence
  Light Chain Sequence
EIVLTQSPGTLSLSPGERATLSCRASQSVSSSYLAWYQQKPGQAPRLLIYGASSRATGIPDRFSGSGSGTDFTLTISRLEPEDFAVYYCQQYGSSPLTFGGGTKVEIK

SEQ ID NO: 405 - protein, 122 aa, Artificial Sequence
  Heavy Chain Sequence
QVQLQESGPGLVKPSETLSLTCTVSGFSLTSYIVDWIRQPPGKGLEWIGVIWAGGSTGYNSALRSRVSITKDTSKNQFSLKLSSVTAADTAVYYCASAAYYSYYNYDGFAYWGQGTLVTVSS

SEQ ID NO: 406 - protein, 112 aa, Artificial Sequence
  Light Chain Sequence
DVVMTQSPLSLPVTLGQPASISCKSSQSLLYTDGKTYLYWFLQRPGQSPRRLIYLVSKLDSGVPDRFSGSGSGTDFTLKISRVEAEDVGVYYCLQSTHFPHTFGGGTKVEIK

SEQ ID NO: 407 - protein, 125 aa, Artificial Sequence
  Heavy Chain Sequence
QVQLVQSGAEVKKPGASVKVSCKASGFTLTNYGMNWVRQARGQRLEWIGWINTDTGEPTYADDFKGRFVFSLDTSVSTAYLQISSLKAEDTAVYYCARNPPYYYGTNNAEAMDYWGQGTTVTVSS

SEQ ID NO: 408 - protein, 107 aa, Artificial Sequence
  Light Chain Sequence
DIQMTQSPSSLSASVGDRVTITCSSSQDISNYLNWYLQKPGQSPQLLIYYTSTLHLGVPSRFSGSGSGTEFTLTISSLQPDDFATYYCQQYYNLPWTFGQGTKVEIK

SEQ ID NO: 409 - protein, 118 aa, Artificial Sequence
  Heavy Chain Sequence
QVQLVQSGAEVKKPGASVKVSCKASGYTFTGYWMNWVRQAPGQGLEWMGDIYPGSGNTNYDEKFQGRVTMTRDTSISTAYMELSRLRSDDTAVYYCARGGYYEDFDSWGQGTTVTVSS

SEQ ID NO: 410 - protein, 107 aa, Artificial Sequence
  Light Chain Sequence
DIQMTQSPSFLSASVGDRVTITCRASQGIISYLAWYQQKPEKAPKRLIYAASSLQSGVPSRFSGSGSGTEFTLTISSLQPEDFATYYCGQYANYPYTFGQGTKLEIK

SEQ ID NO: 411 - protein, 117 aa, Artificial Sequence [sequence omitted]

SEQ ID NO: 412 - protein, 111 aa, Artificial Sequence [sequence omitted]

SEQ ID NO: 413 - protein, 118 aa, Artificial Sequence
  Heavy Chain Sequence
EVQLLESGGGLVQPGGSLRLSCAASGFTFSIYSMNWVRQAPGKGLEWVSSIGSSGGTTYYADSVKGRFTISRDNSKNTLYLQMNSLRAEDTAVYYCAGSQWLYGMDVWGQGTTVTVSS

SEQ ID NO: 414 - protein, 107 aa, Artificial Sequence
  Light Chain Sequence
DIQMTQSPSSLSASVGDRVTITCRSSQRIMTYLNWYQQKPGKAPKLLIFVASHSQSGVPSRFRGSGSETDFTLTISGLQPEDSATYYCQQSFWTPLTFGGGTKVEIK

SEQ ID NO: 415 - protein, 118 aa, Artificial Sequence
  Heavy Chain Sequence
QVTLKESGPVLVKPTETLTLTCTVSGFSLTSNAVSWVRQPPGKALEWIAAISSGGTTYYNSAFKSRLTISRDTSKSQVVLTMTNMDPVDTATYYCARRYGYGWYFDFWGQGTLVTVSS

SEQ ID NO: 416 - protein, 106 aa, Artificial Sequence
  Light Chain Sequence
DIQMTQSPSSLSASVGDRVTINCKASQNIYNSLAWYQQKPGKAPKVLIFNANSLQTGIPSRFSGSGSGTDFTLTISSLQPEDFATYYCQQFYSGYTFGQGTKLEIK

SEQ ID NO: 417 - protein, 120 aa, Artificial Sequence [sequence omitted]

SEQ ID NO: 418 - protein, 106 aa, Artificial Sequence [sequence omitted]

SEQ ID NO: 419 - protein, 124 aa, Artificial Sequence
  Heavy Chain Sequence
EVQLVESGGGLVRPGGSLRLSCAASGFTFSNYDMHWVRQATGKGLEWVSAITAAGDIYYPGSVKGRFTISRENAKNSLYLQMNSLRAGDTAVYYCARGRYSGSGSYYNDWFDPWGQGTLVTVSS

SEQ ID NO: 420 - protein, 107 aa, Artificial Sequence
  Light Chain Sequence
EIVLTQSPATLSLSPGERATLSCRASQSVSSYLAWYQQKPGQAPRLLIYDASNRATGIPARFSGSGSGTDFTLTISSLEPEDFAVYYCQQRSNWPLTFGGGTKVEIK

SEQ ID NO: 421 - protein, 122 aa, Artificial Sequence
  Heavy Chain Sequence
QVQLQQSGSELMMPGASVKISCKATGYTFSNYWIEWVKQRPGHGLEWIGEILPGTGRTIYNEKFKGKATFTADISSNTVQMQLSSLTSEDSAVYYCARRDYYGNFYYAMDYWGQGTSVTVSS

SEQ ID NO: 422 - protein, 107 aa, Artificial Sequence
  Light Chain Sequence
DIQMTQSTSSLSASLGDRVTISCSASQGINNYLNWYQQKPDGTVELLIYYTSTLQSGVPSRFSGSGSGTDYSLTISNLEPEDIGTYYCQQYSKLPRTFGGGTKLEIK

SEQ ID NO: 423 - protein, 119 aa, Artificial Sequence
  Heavy Chain Sequence
QVQLQQWGAGLLKPSETLSLTCAVFGGSFSGYYWSWIRQPPGKGLEWIGEINHRGNTNDNPSLKSRVTISVDTSKNQFALKLSSVTAADTAVYYCARERGYTYGNFDHWGQGTLVTVSS

SEQ ID NO: 424 - protein, 107 aa, Artificial Sequence
  Light Chain Sequence
EIVMTQSPATLSVSPGERATLSCRASQSVSRNLAWYQQKPGQAPRLLIYGASTRATGIPARFSGSGSGTEFTLTIGSLQSEDFAVYYCQQYKTWPRTFGQGTNVEIK

SEQ ID NO: 425 - protein, 121 aa, Artificial Sequence
  Heavy Chain Sequence
EVQLVESGGGLVQPGGSLRLSCAASGFTFSSSWMNWVRQAPGKGLEWVGRIYPGDGDTNYNVKFKGRFTISRDDSKNSLYLQMNSLKTEDTAVYYCARSGFITTVRDFDYWGQGTLVTVSS

SEQ ID NO: 426 - protein, 111 aa, Artificial Sequence
  Light Chain Sequence
EIVLTQSPDFQSVTPKEKVTITCRASESVDTFGISFMNWFQQKPDQSPKLLIHEASNQGSGVPSRFSGSGSGTDFTLTINSLEAEDAATYYCQQSKEVPFTFGGGTKVEIK

SEQ ID NO: 427 - protein, 120 aa, Artificial Sequence
  Heavy Chain Sequence
EVKLEESGGGLVQPGGSMKLSCVASGFIFSNHWMNWVRQSPEKGLEWVAEIRSKSINSATHYAESVKGRFTISRDDSKSAVYLQMTDLRTEDTGVYYCSRNYYGSTYDYWGQGTTLTVSS

SEQ ID NO: 428 - protein, 107 aa, Artificial Sequence
  Light Chain Sequence
DILLTQSPAILSVSPGERVSFSCRASQFVGSSIHWYQQRTNGSPRLLIKYASESMSGIPSRFSGSGSGTDFTLSINTVESEDIADYYCQQSHSWPFTFGSGTNLEVK

SEQ ID NO: 429 - protein, 121 aa, Artificial Sequence
  Heavy Chain Sequence
EVQLVQSGAEVKKPGASVKVSCKASGYRFTNYWIHWVRQAPGQGLEWIGGINPGNNYATYRRKFQGRVTMTADTSTSTVYMELSSLRSEDTAVYYCTREGYGNYGAWFAYWGQGTLVTVSS

SEQ ID NO: 430 - protein, 112 aa, Artificial Sequence
  Light Chain Sequence
DVQVTQSPSSLSASVGDRVTITCRSSQSLANSYGNTFLSWYLHKPGKAPQLLIYGISNRFSGVPDRFSGSGSGTDFTLTISSLQPEDFATYYCLQGTHQPYTFGQGTKVEIK

SEQ ID NO: 431 - protein, 119 aa, Artificial Sequence
  Heavy Chain Sequence
QVQLVESGGGVVQPGRSRRLSCAASGFTFSRYTMHWVRQAPGKGLEWVAVISFDGSNKYYVDSVKGRFTISRDNSENTLYLQVNILRAEDTAVYYCAREARGSYAFDIWGQGTMVTVSS

SEQ ID NO: 432 - protein, 108 aa, Artificial Sequence
  Light Chain Sequence
EIVLTQSPATLSLSPGERATLSCRASQSVSSYLAWYQQKPGQAPRLLIYDASNRATGIPARFSGSGSGTDFTLTISSLEPEDFAVYYCQQRSNWPPFTFGPGTKVDIK

SEQ ID NO: 433 - protein, 118 aa, Artificial Sequence
  Heavy Chain Sequence
QVQLVESGGGVVQPGRSLRLSCAASGFTFSSYTMHWVRQAPGKGLEWVTFISYDGNNKYYADSVKGRFTISRDNSKNTLYLQMNSLRAEDTAIYYCARTGWLGPFDYWGQGTLVTVSS

SEQ ID NO: 434 - protein, 108 aa, Artificial Sequence
  Light Chain Sequence
EIVLTQSPGTLSLSPGERATLSCRASQSVGSSYLAWYQQKPGQAPRLLIYGAFSRATGIPDRFSGSGSGTDFTLTISRLEPEDFAVYYCQQYGSSPWTFGQGTKVEIK

SEQ ID NO: 435 - protein, 112 aa, Artificial Sequence
  Heavy Chain Sequence
QVQLQQWGAGLLKPSETLSLTCAVYGGSFSAYYWSWIRQPPGKGLEWIGDINHGGGTNYNPSLKSRVTISVDTSKNQFSLKLNSVTAADTAVYYCASLTAYWGQGSLVTVSS

SEQ ID NO: 436 - protein, 107 aa, Artificial Sequence
  Light Chain Sequence
DIQMTQSPTSLSASVGDRVTITCRASQGISSWLTWYQQKPEKAPKSLIYAASSLQSGVPSRFSGSGSGTDFTLTISSLQPEDFATYYCQQYDSYPITFGQGTRLEIK

SEQ ID NO: 437 - protein, 120 aa, Artificial Sequence [sequence omitted]

SEQ ID NO: 438 - protein, 107 aa, Artificial Sequence [sequence omitted]

SEQ ID NO: 439 - protein, 120 aa, Artificial Sequence
  Heavy Chain Sequence
QVQLVESGGGVVQPGRSLRLSCAASGFTFSSYGMHWVRQAPGKGLEWVAVISYEESNRYHADSVKGRFTISRDNSKITLYLQMNSLRTEDTAVYYCARDGGIAAPGPDYWGQGTLVTVSS

SEQ ID NO: 440 - protein, 112 aa, Artificial Sequence
  Light Chain Sequence
DIVMTQSPLSLTVTPGEPASISCRSSQSLLYSNGYNYLDWYLQKPGQSPQVLISLGSNRASGVPDRFSGSGSGTDFTLKISRVEAEDVGVYYCMQARQTPFTFGPGTKVDIR

SEQ ID NO: 441 - protein, 122 aa, Artificial Sequence
  Heavy Chain Sequence
EVQLLQSGGGLVQPGGSLRLSCAASGFMFSRYPMHWVRQAPGKGLEWVGSISGSGGATPYADSVKGRFTISRDNSKNTLYLQMNSLRAEDTAVYYCAKDFYQILTGNAFDYWGQGTTVTVSS

SEQ ID NO: 442 - protein, 107 aa, Artificial Sequence
  Light Chain Sequence
DIQMTQSPSSLSASLGDRVTITCRASQGISSYLAWYQQKPGKAPKLLIYAKSTLQSGVPSRFSGSGSGTDFTLTISSLQPEDSATYYCQQYWTFPLTFGGGTKVEIK

SEQ ID NO: 443 - protein, 122 aa, Artificial Sequence
  Heavy Chain Sequence (if bispec)
QVQLVQSGGGLVQPGGSLRLSCAASGFTFDDYAMHWVRQAPGKGLEWVAGISWDSGSTGYADSVKGRFTISRDNAKNSLYLQMNSLRAEDTALYYCARDLGAYQWVEGFDYWGQGTLVTVSS

SEQ ID NO: 444 - protein, 108 aa, Artificial Sequence
  Light Chain Sequence (if bispec)
SYELTQDPAVSVALGQTVRITCQGDSLRSYYASWYQQKPGQAPVLVIYGKNNRPSGIPDRFSGSTSGNSASLTITGAQAEDEADYYCNSRDSPGNQWVFGGGTKVTVL

SEQ ID NO: 445 - protein, 119 aa, Artificial Sequence
  Heavy Chain Sequence
EVQLVESGGGLVKPGGSLKLSCAASGFKFSRYAMSWVRQAPGKRLEWVATISSGGSYIYYPDSVKGRFTISRDNVKNTLYLQMSSLRSEDTAMYYCARRDYDLDYFDSWGQGTLVTVSS

SEQ ID NO: 446 - protein, 107 aa, Artificial Sequence
  Light Chain Sequence
DIQMTQSPSSLSASVGDRVTITCKASRDIRSYLTWYQQKPGKAPKTLIYYATSLADGVPSRFSGSGSGQDYSLTISSLESDDTATYYCLQHGESPFTLGSGTKLEIK

SEQ ID NO: 447 - protein, 119 aa, Artificial Sequence
  Heavy Chain Sequence
QVQLVQSGAEVKKPGSSVKVSCKASGYSFTDYHIHWVRQAPGQGLEWMGVINPMYGTTDYNQRFKGRVTITADESTSTAYMELSSLRSEDTAVYYCARYDYFTGTGVYWGQGTLVTVSS

SEQ ID NO: 448 - protein, 112 aa, Artificial Sequence
  Light Chain Sequence
DIVMTQTPLSLSVTPGQPASISCRSSRSLVHSRGNTYLHWYLQKPGQSPQLLIYKVSNRFIGVPDRFSGSGSGTDFTLKISRVEAEDVGVYYCSQSTHLPFTFGQGTKLEIK

SEQ ID NO: 449 - protein, 119 aa, Artificial Sequence
  Heavy Chain Sequence
EVQLVESGGGVVQPGRSLRLSCSASGFDFTTYWMSWVRQAPGKGLEWIGEIHPDSSTINYAPSLKDRFTISRDNAKNTLFLQMDSLRPEDTGVYFCASLYFGFPWFAYWGQGTPVTVSS

SEQ ID NO: 450 - protein, 106 aa, Artificial Sequence
  Light Chain Sequence
DIQLTQSPSSLSASVGDRVTITCKASQDVGTSVAWYQQKPGKAPKLLIYWTSTRHTGVPSRFSGSGSGTDFTFTISSLQPEDIATYYCQQYSLYRSFGQGTKVEIK

SEQ ID NO: 451 - protein, 118 aa, Artificial Sequence
  Heavy Chain Sequence
QVQLQESGPGLVKPSQTLSLTCTVSDYSITSDYAWNWIRQFPGKGLEWMGYISYSGSTSYNPSLKSRITISRDTSKNQFSLQLNSVTAADTAVYYCASFDYAHAMDYWGQGTTVTVSS

SEQ ID NO: 452 - protein, 107 aa, Artificial Sequence
  Light Chain Sequence
DIVLTQSPAFLSVTPGEKVTFTCQASQSIGTSIHWYQQKTDQAPKLLIKYASESISGIPSRFSGSGSGTDFTLTISSVEAEDAADYYCQQINSWPTTFGGGTKLEIK

SEQ ID NO: 453 - protein, 118 aa, Artificial Sequence
  Heavy Chain Sequence
QIQLVQSGSELKKPGASVKVSCKASGYTFTTAGMQWVRQAPGQGLEWIGWINSHSGVPKYAEDFKGRFVFSLDTSVSTAYLQISSLKAEDTAVYFCARGGDEGVMDYWGQGTTVTVSS

SEQ ID NO: 454 - protein, 107 aa, Artificial Sequence
  Light Chain Sequence
DIQMTQSPSFLSASVGDRVTITCKASQDVSTAVAWYQQKPGQPPKLLIYWTSTRHTGVPDRFSGSGSGTDYTLTISSLQAEDVAVYYCQQHYSTPWTFGGGTKVEIK

SEQ ID NO: 455 - protein, 120 aa, Artificial Sequence
  Heavy Chain Sequence
QVQLVQSGAEVKKPGASVKVSCKASGLTIEDYYMHWVRQAPGQGLEWMGWIDPENGDTEYGPKFQGRVTMTRDTSINTAYMELSRLRSDDTAVYYCAVHNAHYGTWFAYWGQGTLVTVSS

SEQ ID NO: 456 - protein, 112 aa, Artificial Sequence
  Light Chain Sequence
DVVMTQSPLSLPVTLGQPASISCRSSQSLLHSSGNTYLEWYQQRPGQSPRPLIYKISTRFSGVPDRFSGSGSGTDFTLKISRVEAEDVGVYYCFQGSHVPYTFGGGTKVEIK

SEQ ID NO: 457 - protein, 115 aa, Artificial Sequence [sequence omitted]

SEQ ID NO: 458 - protein, 107 aa, Artificial Sequence [sequence omitted]

SEQ ID NO: 459 - protein, 122 aa, Artificial Sequence
  Heavy Chain Sequence
EVQLLESGGGLVQPGGSLRLSCAASGFTFSHYIMMWVRQAPGKGLEWVSGIYSSGGITVYADSVKGRFTISRDNSKNTLYLQMNSLRAEDTAVYYCAYRRIGVPRRDEFDIWGQGTMVTVSS

SEQ ID NO: 460 - protein, 106 aa, Artificial Sequence
  Light Chain Sequence
DIQMTQSPSTLSASVGDRVTITCRASQSISSWLAWYQQKPGKAPKLLIYKASTLESGVPSRFSGSGSGTEFTLTISSLQPDDFATYYCQQYNTYWTFGQGTKVEIK

SEQ ID NO: 461 - protein, 113 aa, Artificial Sequence
  Heavy Chain Sequence
EVQLVESGGGLVQPGGSLRLSCAASGLTFSRYPMSWVRQAPGKGLVWVSAITSSGGSTYYSDTVKGRFTISRDNAKNTLYLQMNSLRAEDTAVYYCARLPDYWGQGTLVTVSS

SEQ ID NO: 462 - protein, 108 aa, Artificial Sequence
  Light Chain Sequence
EIVLTQSPGTLSLSPGERATLSCRASSSVSSSYLHWYQQKPGQAPRLLIYSTSNLVAGIPDRFSGSGSGTDFTLTISRLEPEDFAVYYCQHHSGYHFTFGGGTKVEIK

SEQ ID NO: 463 - protein, 119 aa, Artificial Sequence
  Heavy Chain Sequence
QVQLVQSGAEVAKPGASVKLSCKASGYTFTSYWMQWVKQRPGQGLECIGTIYPGDGDTTYTQKFQGKATLTADKSSSTAYMQLSSLRSEDSAVYYCARYDAPGYAMDYWGQGTLVTVSS

SEQ ID NO: 464 - protein, 107 aa, Artificial Sequence
  Light Chain Sequence
DIQMTQSPSSLSASVGDRVTITCRASQDINNYLAWYQHKPGKGPKLLIHYTSTLHPGIPSRFSGSGSGRDYSFSISSLEPEDIATYYCLQYDNLLYTFGQGTKLEIK

SEQ ID NO: 465 - protein, 119 aa, Artificial Sequence
  Heavy Chain Sequence
EVQLQESGPELEMPGASVKISCKASGSSFTGFSMNWVKQSNGKSLEWIGNIDTYYGGTTYNQKFKGKATLTVDKSSSTAYMQLKSLTSEDSAVYYCARSAYYGSTFAYWGQGTLVTVSA

SEQ ID NO: 466 - protein, 107 aa, Artificial Sequence
  Light Chain Sequence
DIQMTQSPASLSASVGETVTITCRASENIYSYLAWYQQKQGKSPQLLVYNAKTLIEGVPSRFSGSGSGTQFSLKINSLQPEDFGSYFCQHHFGTPFTFGSGTELEIK

SEQ ID NO: 467 - protein, 118 aa, Artificial Sequence [sequence omitted]

SEQ ID NO: 468 - protein, 111 aa, Artificial Sequence [sequence omitted]

SEQ ID NO: 469 - protein, 129 aa, Artificial Sequence
  Heavy Chain Sequence
EVQLVESGGGLVKPGGSLRLSCSASGFSLTKYKMTWVRQAPGKGLEWVSSISSTSRDIDYADSVKGRFTISRDNAKNSLFLQMSSLRVDDTAVYYCTRDGWLWGWDVRSNYYYNALDVWGQGTTVTVSS

SEQ ID NO: 470 - protein, 107 aa, Artificial Sequence
  Light Chain Sequence
DIVVTQSPSSLSASVGDRVTITCRASQGIYNSIAWYQQKPGKAPKLLLYSTSTLLSGVPSRFSGSGSGTDYTLTITNLQPEDFATYYCQQYFVTPETFGQGTKLEIK

SEQ ID NO: 471 - protein, 119 aa, Artificial Sequence [sequence omitted]

SEQ ID NO: 472 - protein, 107 aa, Artificial Sequence [sequence omitted]

SEQ ID NO: 473 - protein, 122 aa, Artificial Sequence
  Heavy Chain Sequence
EVQLVESGGGLVKPGGSLRLSCAASGYTFSNYWIGWVRQAPGKGLEWIGDIYPGGNYIRNNEKFKDKTTLSADTSKNTAYLQMNSLKTEDTAVYYCGSSFGSNYVFAWFTYWGQGTLVTVSS

SEQ ID NO: 474 - protein, 112 aa, Artificial Sequence
  Light Chain Sequence
DIVMTQSPLSLPVTPGEPASISCRSSQRLLSSYGHTYLHWYLQKPGQSPQLLIYEVSNRFSGVPDRFSGSGSGTDFTLKISRVEAEDVGVYYCSQSTHVPLTFGQGTKVEIK

SEQ ID NO: 475 - protein, 123 aa, Artificial Sequence
  Heavy Chain Sequence
EVQLVQSGAEVKKPGESLKISCKVSGYSFTSQWIGWVRQMPGKGLEWIGMMYPGESETIYSPSFQGQVTISADNSISTAYLQWSSLKASDTAIYYCASGPGYSGYHYGWFDTWGQGTLVTVSS

SEQ ID NO: 476 - protein, 112 aa, Artificial Sequence
  Light Chain Sequence
DIVMTQSPLSLPVTPGEPASISCRSSQSLLRSNGYNYLDWYLQKPGQSPQLLIYLGSNRASGVPDRFSGSGSGTDFTLKISRVEAEDVGVYYCMQALQTPYTFGQGTKLEIK

SEQ ID NO: 477 - protein, 118 aa, Artificial Sequence
  Heavy Chain Sequence
EVQLLESGGGLVQPGGSLRLSCAASGFTFNWELMGWARQAPGKGLEWVSGIEGPGDVTYYADSVKGRFTISRDNSKNTLYLQMNSLRAEDTAVYYCVKVGKDAKSDYRGQGTLVTVSS

SEQ ID NO: 478 - protein, 120 aa, Artificial Sequence
  Heavy Chain Sequence
QVQLVQSGGGLVQPGGSLRLSCAASGFTFSSYYMSWVRQAPGKGLEWVSGIYSDGTTHYGDSVKGRFTISRDNAKNTVYLQLNSLRAEDTAMYYCAKGAGPTWWYALDAWGQGTLVTVSS

SEQ ID NO: 479 - protein, 111 aa, Artificial Sequence
  Light Chain Sequence
DIQLTQSPSSVSVSVGERVTIDCKSSQSVLSASNTYLNWYQQKPGQAPQLLIYYASTRESGVPDRFSGSGSGTDFTLTISSLQAEDAAVYYCQQAYRAPVTFGQGTKLEIK

SEQ ID NO: 480 - protein, 121 aa, Artificial Sequence
  Heavy Chain Sequence
EVQLVQSGGGVERPGGSLRLSCAASGFTFDDYGMSWVRQAPGKGLEWVSGINWNGGSTGYADSVKGRVTISRDNAKNSLYLQMNSLRAEDTAVYYCAKILGAGRGWYFDLWGKGTTVTVSS

SEQ ID NO: 481 - protein, 108 aa, Artificial Sequence
  Light Chain Sequence
SSELTQDPAVSVALGQTVRITCQGDSLRSYYASWYQQKPGQAPVLVIYGKNNRPSGIPDRFSGSSSGNTASLTITGAQAEDEADYYCNSRDSSGNHVVFGGGTKLTVL

SEQ ID NO: 482 - protein, 120 aa, Artificial Sequence
  Heavy Chain Sequence
EVQLVESGGGLVQPGGSLRLSCAASGFSFSDFAMSWVRQAPGKGLEWVATIGRVAFHTYYPDSMKGRFTISRDNSKNTLYLQMNSLRAEDTAVYYCARHRGFDVGHFDFWGQGTLVTVSS

SEQ ID NO: 483 - protein, 112 aa, Artificial Sequence
  Light Chain Sequence
DIQMTQSPSSLSASVGDRVTITCRSSETLVHSSGNTYLEWYQQKPGKAPKLLIYRVSNRFSGVPSRFSGSGSGTDFTLTISSLQPEDFATYYCFQGSFNPLTFGQGTKVEIK

SEQ ID NO: 484 - protein, 123 aa, Artificial Sequence
  Heavy Chain Sequence
QVQLVQSGAEVMKPGSSVKVSCKASGYTFSWYWLEWVRQAPGHGLEWMGEIDPGTFTTNYNEKFKARVTFTADTSTSTAYMELSSLRSEDTAVYYCARFSHFSGSNYDYFDYWGQGTLVTVSS

SEQ ID NO: 485 - protein, 107 aa, Artificial Sequence
  Light Chain Sequence
EIVMTQSPATLSVSPGERATLSCRASQSIGTNIHWYQQKPGQAPRLLIYYASESISGIPARFSGSGSGTEFTLTISSLQSEDFAVYYCQQSWSWPTTFGGGTKVEIK

SEQ ID NO: 486 - protein, 119 aa, Artificial Sequence
  Heavy Chain Sequence
EIQLQQSGPELVKPGASVKVSCKASGYSFTDYNMYWVKQSHGKSLEWIGYIDPYNGDTTYNQKFKGKATLTVDKSSSTAFIHLNSLTSEDSAVYYCARSPYGHYAMDYWGQGTSVTVSS

SEQ ID NO: 487 - protein, 107 aa, Artificial Sequence
  Light Chain Sequence
DIVMTQSHKLLSTSVGDRVSITCKASQDVSTAVDWYQQKPGQSPKLLINWASTRHTGVPDRFTGSGSGTDYTLTISSMQAEDLALYYCRQHYSTPFTFGSGTKLEIK

SEQ ID NO: 488 - protein, 116 aa, Artificial Sequence
  Heavy Chain Sequence
QVQLVQSGAEVKKPGSSVKVSCKASGYTFTDYNMHWVRQAPGQGLEWIGYIYPYNGGTGYNQKFKSKATITADESTNTAYMELSSLRSEDTAVYYCARGRPAMDYWGQGTLVTVSS

SEQ ID NO: 489 - protein, 111 aa, Artificial Sequence
  Light Chain Sequence
DIQMTQSPSSLSASVGDRVTITCRASESVDNYGISFMNWFQQKPGKAPKLLIYAASNQGSGVPSRFSGSGSGTDFTLTISSLQPDDFATYYCQQSKEVPWTFGQGTKVEIK

SEQ ID NO: 490 - protein, 123 aa, Artificial Sequence
  Heavy Chain Sequence
QVQLVQSGAEVKKPGSSVKVSCKASGGTFSFYAISWVRQAPGQGLEWMGGFIPIFGAANYAQKFQGRVTITADESTSTAYMELSSLRSDDTAVYYCARIPSGSYYYDYDMDVWGQGTTVTVSS

SEQ ID NO: 491 - protein, 107 aa, Artificial Sequence
  Light Chain Sequence
EIVLTQSPVTLSLSPGERATLSCRASQSVSSYLAWYQQKPGQAPRLLIYDASNRATGIPARFSGSGSGTDFTLTISSLEPEDFAVYYCQQRSNWMYTFGQGTKLEIK

SEQ ID NO: 492 - protein, 118 aa, Artificial Sequence
  Heavy Chain Sequence
QVQLVQSGAEVKKPGASVKVSCKASGYTFSTMYMSWVRQAPGQGLEWMGRIDPANEHTNYAQKFQGRVTMTRDTSISTAYMELSRLTSDDTAVYYCARSYYYYNMDYWGQGTLVTVSS

SEQ ID NO: 493 - protein, 106 aa, Artificial Sequence
  Light Chain Sequence
QIVLTQSPATLSVSPGERATLSCRASQSVSYMHWYQQKPGQAPRLLIYGVFRRATGIPDRFSGSGSGTDFTLTIGRLEPEDFAVYYCLQWSSDPPTFGQGTKLEIK

SEQ ID NO: 494 - protein, 118 aa, Artificial Sequence
  Heavy Chain Sequence
EVQLVESGGDLVKPGGSLRLSCVASGFTFSNYGMSWVRQAPGKGLQWVATISYGGSYTYYPDNIKGRFTISRDNAKNTLYLQMNSLRAEDTAMYYCVRGYGYDTMDYWGQGTLVTVSS

SEQ ID NO: 495 - protein, 111 aa, Artificial Sequence
  Light Chain Sequence
EIVMTQSPASLSLSQEEKVTITCKASQSVSFAGTGLMHWYQQKPGQAPKLLIYRASNLEAGVPSRFSGSGSGTDFSFTISSLEPEDVAVYYCQQSREYPWTFGQGTKLEIK

SEQ ID NO: 496 - protein, 120 aa, Artificial Sequence; identical to SEQ ID NO: 186
  Heavy Chain Sequence

SEQ ID NO: 497 - protein, 104 aa, Artificial Sequence
  Light Chain Sequence
EIVLTQSPAIMSASPGERVTMTCSASSGVNYMHWYQQKPGTSPRRWIYDTSKLASGVPARFSGSGSGTSYSLTISSMEPEDAATYYCHQRGSYTFGGGTKLEIK

SEQ ID NO: 498 - protein, 113 aa, Artificial Sequence
  Heavy Chain Sequence
EVQLVQSGAEVEKPGASVKISCKASGSSFTGYNMNWVRQNIGKSLEWIGAIDPYYGGTSYNQKFKGRATLTVDKSTSTAYMHLKSLRSEDTAVYYCVSGMEYWGQGTSVTVSS

SEQ ID NO: 499 - protein, 113 aa, Artificial Sequence
  Light Chain Sequence
DVVMTQTPLSLPVTPGEPASISCRSSQSLVHRNGNTYLHWYLQKPGQSPKLLIHKVSNRFSGVPDRFSGSGSGTDFTLKISRVEAEDLGVYFCSQSTHVPPLTFGAGTKLELK

SEQ ID NO: 500 - protein, 118 aa, Artificial Sequence
  Heavy Chain Sequence
QVQLVESGGGVVQPGRSLRLSCAASGFTFSSFGMHWVRQAPGKGLEWVAYISSGSFTIYYADSVKGRFTISRDNSKNTLYLQMNSLRAEDTAVYYCARMRKGYAMDYWGQGTLVTVSS

SEQ ID NO: 501 - protein, 112 aa, Artificial Sequence
  Light Chain Sequence
DVVMTQSPLSLPVTLGQPASISCRSSQIIIHSDGNTYLEWFQQRPGQSPRRLIYKVSNRFSGVPDRFSGSGSGTDFTLKISRVEAEDVGVYYCFQGSHVPHTFGQGTKVEIK

SEQ ID NO: 502 - protein, 116 aa, Artificial Sequence
  Heavy Chain Sequence
EVQLQESGPGLVKPSQTLSLTCTVSGYSISRDFAWNWIRQPPGKGLEWMGYISYNGNTRYQPSLKSRITISRDTSKNQFFLKLNSVTAADTATYYCVTASRGFPYWGQGTLVTVSS

SEQ ID NO: 503 - protein, 107 aa, Artificial Sequence; identical to SEQ ID NO: 223
  Light Chain Sequence

SEQ ID NO: 504 - protein, 120 aa, Artificial Sequence; identical to SEQ ID NO: 439
  Heavy Chain Sequence

SEQ ID NO: 505 - protein, 112 aa, Artificial Sequence; identical to SEQ ID NO: 440
  Light Chain Sequence

SEQ ID NO: 506 - protein, 107 aa, Artificial Sequence
  Light Chain Sequence
DIQMTQSPSSLSASVGDRVTITCRASRPIWPFLEWYQQKPGKAPKLLIYFTSRLRHGVPSRFSGSGSGTCFTLTISSLQPEDFATYYCLQNVANPATFSQGTKVEIK

SEQ ID NO: 507 - protein, 118 aa, Artificial Sequence
  Heavy Chain Sequence
EVQLVESGGGLAKPGGSLRLSCAASGFRFTFNNYYMDWVRQAPGQGLEWVSRISSSGDPTWYADSVKGRFTISRENANNTLFLQMNSLRAEDTAVYYCASLTTGSDSWGQGVLVTVSS

SEQ ID NO: 508 - protein, 107 aa, Artificial Sequence
  Light Chain Sequence
DIQMTQSPSSLSASVGDRVTITCRASQDIRYYLNWYQQKPGKAPKLLIYVASSLQSGVPSRFSGSGSGTEFTLTVSSLQPEDFATYYCLQVYSTPRTFGQGTKVEIK

SEQ ID NO: 509 - protein, 120 aa, Artificial Sequence
  Heavy Chain Sequence
QVQLVQSGAEVKKPGASVKVSCKASGYTFRSSYISWVRQAPGQGLEWMGWIYAGTGSPSYNQKLQGRVTMTTDTSTSTAYMELRSLRSDDTAVYYCARHRDYYSNSLTYWGQGTLVTVSS

SEQ ID NO: 510 - protein, 113 aa, Artificial Sequence
  Light Chain Sequence
DIVMTQSPDSLAVSLGERATINCKSSQSVLNSGNQKNYLTWYQQKPGQPPKLLIYWASTRESGVPDRFSGSGSGTDFTLTISSLQAEDVAVYYCQSDYSYPYTFGQGTKLEIK

SEQ ID NO: 511 - protein, 117 aa, Artificial Sequence
  Heavy Chain Sequence
EVQLLESGGGLVQPGGSLRLSCAASGFTFSNAWMSWVRQAPGKGLEWVSYISSSGSTIYYADSVKGRFTISRDNSKNTLYLQMNSLRAEDTAVYYCAREGLWAFDYWGQGTLVTVSS

SEQ ID NO: 512 - protein, 111 aa, Artificial Sequence
  Light Chain Sequence
ESVLTQPPSVSGAPGQRVTISCTGSSSNIGAGYVVHWYQQLPGTAPKLLIYDNNKRPSGVPDRFSGSKSGTSASLAISGLRSEDEADYYCAAWDDRLNGPVFGGGTKLTVL

SEQ ID NO: 513 - protein, 119 aa, Artificial Sequence
  Heavy Chain Sequence
EVQLVESGGGVVQPGRSLRLSCSASGFIFSRYDMSWVRQAPGKGLEWVAYISHGGAGTYYPDSVKGRFTISRDNSKNTLFLQMDSLRPEDTGVYFCARGGVTKGYFDVWGQGTPVTVSS

SEQ ID NO: 514 - protein, 107 aa, Artificial Sequence
  Light Chain Sequence
DIQMTQSPSSLSASVGDRVTITCRASGNIHNYLTWYQQTPGKAPKLLIYNAKTLADGVPSRFSGSGSGTDYTFTISSLQPEDIATYYCQHFWSIPYTFGQGTKLQIT

SEQ ID NO: 515 - protein, 122 aa, Artificial Sequence; identical to SEQ ID NO: 95
  Heavy Chain Sequence (if bispec)

SEQ ID NO: 516 - protein, 107 aa, Artificial Sequence; identical to SEQ ID NO: 96
  Light Chain Sequence (if bispec)

SEQ ID NO: 517 - protein, 118 aa, Artificial Sequence
  Heavy Chain Sequence
EVQLVESGGGLVQPGGSLRLSCAASGFTSSSYAMNWVRQAPGKGLEWVSTISGMGGSTYYADSVKGRFTISRDNSKNTLYLQMNSLRAEDTAVYYCAKRGYPHSFDIWGQGTMVTVSS

SEQ ID NO: 518 - protein, 106 aa, Artificial Sequence
  Light Chain Sequence
DIQMTQSPSSLSASVGDRVTITCRASQSISSFLNWYQQKPGKAPKLLIYAASSLQSGVPSRFSGSGSGTDFTLTISSLQPEDFATYYCQQSYSTLTFGQGTRLEIK

SEQ ID NO: 519 - protein, 117 aa, Artificial Sequence
  Heavy Chain Sequence
QVQLVQSGAEVKKPGASVKVSCKASGYTFTNYNMHWVRQAPGQRLEWMGTIYPGNDDTSYNQKFKDRVTITADTSASTAYMELSSLRSEDTAVYYCARGGYRAMDYWGQGTLVTVSS

SEQ ID NO: 520 - protein, 112 aa, Artificial Sequence
  Light Chain Sequence
DIVMTQSPLSLPVTPGEPASISCRSSQSIVYSNGNTYLGWYLQKPGQSPQLLIYKVSNRFSGVPDRFSGSGSGTDFTLKISRVEAEDVGVYYCFQGSHVPYTFGQGTKLEIK

SEQ ID NO: 521 - protein, 120 aa, Artificial Sequence
  Heavy Chain Sequence
QVQLQQSGPELVKPGASLKLSCTASGFNIKDTYIHWVKQRPEQGLEWIGRIYPTNGYTRYDPKFQDKATITADTSSNTAYLQVSRLTSEDTAVYYCSRWGGDGFYAMDYWGQGASVTVSS

SEQ ID NO: 522 - protein, 107 aa, Artificial Sequence
  Light Chain Sequence
DIVMTQSHKFMSTSVGDRVSITCKASQDVNTAVAWYQQKPGHSPKLLIYSASFRYTGVPDRFTGSRSGTDFTFTISSVQAEDLAVYYCQQHYTTPPTFGGGTKVEIK

SEQ ID NO: 523 - protein, 120 aa, Artificial Sequence
  Heavy Chain Sequence
EVQLLESGGGLVQPGGSLRLSCAASGFTFSSYAMSWVRQAPGKGLEWVSAISGSGGSTYYADSVKGRFTISRDNSKNTLYLQMNSLRAEDTAVYYCAILGATSLSAFDIWGQGTMVTVSS

SEQ ID NO: 524 - protein, 112 aa, Artificial Sequence
  Light Chain Sequence
QSVLTQPPSVSGAPGQRVTISCTGSSSNIGAGYDVHWYQQLPGTAPKLLIYGNSNRPSGVPDRFSGSKSGTSASLAITGLQAEDEADYYCQSYDSSLSGSGVFGGGTKLTVL

SEQ ID NO: 525 - protein, 121 aa, Artificial Sequence [sequence omitted]

SEQ ID NO: 526 - protein, 106 aa, Artificial Sequence [sequence omitted]

SEQ ID NO: 527 - protein, 120 aa, Artificial Sequence
  Heavy Chain Sequence
QVQLVQSGAEVKKPGASVKVSCKVSGYTLTELSIHWVRQAPGKGLEWMGGFDPEENEIVYAQRFQGRVTMTEDTSTDTAYMELSSLRSEDTAVYYCAIVGSFSPLTLGLWGQGTMVTVSS

SEQ ID NO: 528 - protein, 111 aa, Artificial Sequence
  Light Chain Sequence
QSVLTQPPSVSGAPGQRVTISCTGSGSNIGAPYDVSWYQQLPGTAPKLLIYHNNKRPSGVPDRFSGSKSGTSASLAITGLQAEDEADYYCATVEAGLSGSVFGGGTKLTVL

SEQ ID NO: 529 - protein, 119 aa, Artificial Sequence [sequence omitted]

SEQ ID NO: 530 - protein, 113 aa, Artificial Sequence [sequence omitted]

SEQ ID NO: 531 - protein, 120 aa, Artificial Sequence
  Heavy Chain Sequence
QVQLQQSGSELKKPGASVKVSCKASGYTFTNYGVNWIKQAPGQGLQWMGWINPNTGEPTFDDDFKGRFAFSLDTSVSTAYLQISSLKADDTAVYFCSRSRGKNEAWFAYWGQGTLVTVSS

SEQ ID NO: 532 - protein, 112 aa, Artificial Sequence
  Light Chain Sequence
DIQLTQSPLSLPVTLGQPASISCRSSQSLVHRNGNTYLHWFQQRPGQSPRLLIYTVSNRFSGVPDRFSGSGSGTDFTLKISRVEAEDVGVYFCSQSSHVPPTFGAGTRLEIK

SEQ ID NO: 533 - protein, 115 aa, Artificial Sequence
  Heavy Chain Sequence
QVQLVQSGAEVKKPGSSVKVSCKASGYKFTRYVMHWVRQAPGQGLEWMGYINPYNDGTNYNEKFKGRVTITADKSTSTAYMELSSLRSEDTAVYYCARNWDTGLWGQGTTVTVSS

SEQ ID NO: 534 - protein, 107 aa, Artificial Sequence
  Light Chain Sequence
DIQMTQSPSSLSASVGDRVTITCKASDHILKFLTWYQQKPGKAPKLLIYGATSLETGVPSRFSGSGSGTDFTLTISSLQPEDFATYYCQMYWSTPFTFGGGTKVEIK

SEQ ID NO: 535 - protein, 118 aa, Artificial Sequence
  Heavy Chain Sequence
QVQLVQSGAEVVKPGASVKISCKASGYTFTGYFMNWVKQSPGQSLEWIGRIHPYDGDTFYNQKFQGKATLTVDKSSNTAHMELLSLTSEDFAVYYCTRYDGSRAMDYWGQGTTVTVSS

SEQ ID NO: 536 - protein, 111 aa, Artificial Sequence
  Light Chain Sequence
DIVLTQSPLSLAVSLGQPAIISCKASQSVSFAGTSLMHWYHQKPGQQPRLLIYRASNLEAGVPDRFSGSGSKTDFTLTISPVEAEDAATYYCQQSREYPYTFGGGTKLEIK

SEQ ID NO: 537 - protein, 119 aa, Artificial Sequence
  Heavy Chain Sequence
EVQLLESGGGLVQPGGSLRLSCAASGFTFSTYGMHWVRQAPGKGLEWLSYISGGSSYIFYADSVRGRFTISRDNSENALYLQMNSLRAEDTAVYYCARILRGGSGMDLWGQGTLVTVSS

SEQ ID NO: 538 - protein, 111 aa, Artificial Sequence
  Light Chain Sequence
QSVLTQPPSASGTPGQRVTISCTGSSSNIGAGYNVYWYQQLPGTAPKLLIYGNINRPSGVPDRFSGSKSGTSASLAISGLRSEDEADYYCAAWDKSISGLVFGGGTKLTVL

SEQ ID NO: 539 - protein, 119 aa, Artificial Sequence
  Heavy Chain Sequence
QVQLQQPGAELVEPGGSVKLSCKASGYTFTSHWMHWVKQRPGQGLEWIGEINPSSGRNNYNEKFKSKATLTVDKSSSTAYMQFSSLTSEDSAVYYCVRYYGYDEAMDYWGQGTSVTVSS

SEQ ID NO: 540 - protein, 112 aa, Artificial Sequence
  Light Chain Sequence
DIVMTQAAFSNPVTLGTSASISCRSSKSLLHSNGITYLYWYLQKPGQSPQLLIYQMSNLASGVPDRFSSSGSGTDFTLRISRVEAEDVGVYYCAQNLELPYTFGGGTKLEIK

SEQ ID NO: 541 - protein, 119 aa, Artificial Sequence
  Heavy Chain Sequence
EVQLVESGGDLVQPGRSLRLSCAASGFIFSNYGMSWVRQAPGKGLEWVATISSASTYSYYPDSVKGRFTISRDNAKNSLYLQMNSLRVEDTALYYCGRHSDGNFAFGYWGQGTLVTVSS

SEQ ID NO: 542 - protein, 112 aa, Artificial Sequence
  Light Chain Sequence
DVLMTQSPLSLPVTPGEPASISCRSSRNIVHINGDTYLEWYLQKPGQSPQLLIYKVSNRFSGVPDRFSGSGSGTDFTLKISRVEAEDVGVYYCFQGSLLPWTFGQGTKVEIK

SEQ ID NO: 543 - protein, 125 aa, Artificial Sequence
  Heavy Chain Sequence
QVQLVQSGAEVKKPGASVKVSCKASGYTFTSYWMNWVRQAPGQGLEWMGRIDPYDSETHYAQKLQGRVTMTTDTSTSTAYMELRSLRSDDTAVYYCARGGYDFDVGTLYWFFDVWGQGTTVTVSS

SEQ ID NO: 544 - protein, 107 aa, Artificial Sequence
  Light Chain Sequence
DIQMTQSPSSLSASVGDRVTITCRASENIYSYLAWYQQKPGKAPKLLIYNAKTLAEGVPSRFSGSGSGTDFTLTISSLQPEDFATYYCQHHYGTPRTFGGGTKVEIK

SEQ ID NO: 545 - protein, 119 aa, Artificial Sequence
  Heavy Chain Sequence
EVQLVQSGAEVKKPGASVKVSCKASGYTFTNYYIHWVRQAPGQGLEWIGWIYPGDGNTKYNEKFKGRATLTADTSTSTAYLELSSLRSEDTAVYYCARDSYSNYYFDYWGQGTLVTVSS

SEQ ID NO: 546 - protein, 112 aa, Artificial Sequence
  Light Chain Sequence
DIVMTQSPDSLAVSLGERATINCKSSQSLLNSRTRKNYLAWYQQKPGQPPKLLIYWASTRESGVPDRFSGSGSGTDFTLTISSLQAEDVAVYYCTQSFILRTFGQGTKVEIK

SEQ ID NO: 547 - protein, 122 aa, Artificial Sequence [sequence omitted]

SEQ ID NO: 548 - protein, 106 aa, Artificial Sequence [sequence omitted]

SEQ ID NO: 549 - protein, 120 aa, Artificial Sequence [sequence omitted]

SEQ ID NO: 550 - protein, 106 aa, Artificial Sequence [sequence omitted]

SEQ ID NO: 551 - protein, 123 aa, Artificial Sequence
  Heavy Chain Sequence
EVQLVESGGGLVKPGGSLKLSCAASGFAFSIYDMSWVRQTPEKCLEWVAYISSGGGTTYYPDTVKGRFTISRDNAKNTLYLQMSSLKSEDTAMYYCARHSGYGTHWGVLFAYWGQGTLVTVSA

SEQ ID NO: 552 - protein, 106 aa, Artificial Sequence
  Light Chain Sequence
DIQMTQTTSSLSASLGDRVTISCRASQDISNYLNWYQQKPDGTVKLLIYYTSILHSGVPSRFSGSGSGTDYSLTISNLEQEDFATYFCQQGNTLPWTFGCGTKLEI

SEQ ID NO: 553 - protein, 115 aa, Artificial Sequence
  Heavy Chain Sequence
QVRLVQSGAEVKKPGASVKVSCKASGYTFTSYHIHWVRQAPGQRLEWMGWIYPGDDSTKYSQKFQGRVTITRDTSASTAYMELSSLRSEDTAVYYCTRGDRFAYWGQGTLVTVSS

SEQ ID NO: 554 - protein, 106 aa, Artificial Sequence
  Light Chain Sequence
DIQMTQSPSTLSASVGDRVTITCRASSSVRYIAWYQQKPGKAPKLLTYPTSSLKSGVPSRFSGSGSGTEFTLTISSLQPDDFATYYCLQWSSYPWTFGGGTKVEIK

SEQ ID NO: 555 - protein, 119 aa, Artificial Sequence [sequence omitted]

SEQ ID NO: 556 - protein, 106 aa, Artificial Sequence [sequence omitted]

SEQ ID NO: 557 - protein, 119 aa, Artificial Sequence
  Heavy Chain Sequence
QVQLVQSGAEVKKPGASVKVSCKAFGYPFTDYLLHWVRQAPGQGLEWVGWLNPYSGDTNYAQKFQGRVTMTRDTSISTAYMELSRLRSDDTAVYYCTRTTLISVYFDYWGQGTMVTVSS

SEQ ID NO: 558 - protein, 107 aa, Artificial Sequence
  Light Chain Sequence
DIQMTQSPSSVSASVGDRVTIACRASQNIRNILNWYQQRPGKAPQLLIYAASNLQSGVPSRFSGSGSGTDFTLTINSLQPEDFATYYCQQSYSMPRTFGGGTKLEIK

SEQ ID NO: 559 - protein, 120 aa, Artificial Sequence
  Heavy Chain Sequence
EVQLQQSGPDLVKPGASVKISCKASGYSFTGYYMHWVKQSPGKGLEWIGRINPNNGVTLYNQKFKDKATLTVDKSSTTAYMELRSLTSEDSAVYYCARSTMITNYVMDYWGQGTSVTVSS

SEQ ID NO: 560 - protein, 107 aa, Artificial Sequence
  Light Chain Sequence
SIVMTQTPTSLLVSAGDRVTITCKASQSVSNDVAWYQQKPGQSPKLLISYTSSRYAGVPDRFSGSGYGTDFTLTISSVQAEDAAVYFCQQDYNSPPTFGGGTKLEIK

SEQ ID NO: 561 - protein, 115 aa, Artificial Sequence
  Heavy Chain Sequence
QVQVQESGPGLVAPSQTLSITCTVSGFSLTTSGVSWVRQPPGKGLEWLGVIWGDGSTNYHPSLKSRLSIKKDHSKSQVFLKLNSLTAADTATYYCAKGGYSLAHWGQGTLVTVSS

SEQ ID NO: 562 - protein, 107 aa, Artificial Sequence
  Light Chain Sequence
DIQMTQSPSSLSVSVGERVTITCRASENIRSNLAWYQQKPGKSPKLLVNVATNLADGVPSRFSGSGSGTDYSLKINSLQPEDFGTYYCQHYWGTTWTFGQGTKLEIK

SEQ ID NO: 563 - protein, 122 aa, Artificial Sequence
  Heavy Chain Sequence
EVQLVESGGGLVQPGGSLRLSCAASGFTFSSYLMTWVRQAPGKGLEWVANIKQDGSEKYYVDSVKGRFTISRDNAKNSLNLQMNSLRAEDTAVYYCTRDGYSSGRHYGMDVWGQGTTVIVSS

SEQ ID NO: 564 - protein, 107 aa, Artificial Sequence
  Light Chain Sequence
EIVLTQSPATLSLSPGERATLSCRASQSVSRYLAWYQQKPGQAPRLLIYDASNRATGIPARFSGSGSGTDFTLTISSLEPEDFAVYYCQQRSNWPRTFGQGTKVEIK

SEQ ID NO: 565 - protein, 123 aa, Artificial Sequence [sequence omitted]

SEQ ID NO: 566 - protein, 106 aa, Artificial Sequence [sequence omitted]

SEQ ID NO: 567 - protein, 126 aa, Artificial Sequence [sequence omitted]

SEQ ID NO: 568 - protein, 108 aa, Artificial Sequence [sequence omitted]

SEQ ID NO: 569 - protein, 119 aa, Artificial Sequence
  Heavy Chain Sequence
QVQLVQSGAEVKKPGASVKISCKASGYSFTAYYIHWVKQAPGQGLEWIGYISNYNRATNYNQKFKGRVTFTTDTSTSTAYMELRSLRSDDTAVYYCARDYDYDVGMDYWGQGTLVTVSS

SEQ ID NO: 570 - protein, 111 aa, Artificial Sequence; identical to SEQ ID NO: 217
  Light Chain Sequence

SEQ ID NO: 571 - protein, 121 aa, Artificial Sequence
  Heavy Chain Sequence (if bispec)
QVQLVQSGAEVKKPGASVKVSCKASGYTFTNYWMHWVRQAPGQGLEWMGDINPSNGRTSYKEKFKRRVTLSVDKSSSTAYMELSSLRSEDTAVYFCTIHYDDKYYPLMDYWGQGTLVTVSS

SEQ ID NO: 572 - protein, 111 aa, Artificial Sequence; identical to SEQ ID NO: 217
  Light Chain Sequence (if bispec)

SEQ ID NO: 573 - protein, 119 aa, Artificial Sequence
  Heavy Chain Sequence
QVQLVESGPGVVQPGRSLRISCAVSGFSVTNYGVHWVRQPPGKGLEWLGVIWAGGITNYNSAFMSRLTISKDNSKNTVYLQMNSLRAEDTAMYYCASRGGHYGYALDYWGQGTLVTVSS

SEQ ID NO: 574 - protein, 104 aa, Artificial Sequence
  Light Chain Sequence
EIVMTQTPATLSVSAGERVTITCKASQSVSNDVTWYQQKPGQAPRLLIYSASNRYSGVPARFSGSGYGTEFTFTISSVQSEDFAVYFCQQDYSSFGQGTKLEIK

SEQ ID NO: 575 - protein, 121 aa, Artificial Sequence [sequence omitted]

SEQ ID NO: 576 - protein, 107 aa, Artificial Sequence [sequence omitted]

SEQ ID NO: 577 - protein, 121 aa, Artificial Sequence
  Heavy Chain Sequence
QVQLVQSGAEVKKPGASVKVSCKASGYTFTGYIMNWVRQAPGQGLEWMGLINPYNGGTDYNPQFQDRVTITADKSTSTAYMELSSLRSEDTAVYYCARDGYDDGPYTLETWGQGTLVTVSS

SEQ ID NO: 578 - protein, 107 aa, Artificial Sequence
  Light Chain Sequence
DIQMTQSPSSLSASVGDRVTITCQASEDIYSFVAWYQQKPGKAPKLLIYNAQTEAQGVPSRFSGSGSGTDFTLTISSLQPEDFATYYCQHHYDSPLTFGGGTKVEIK

SEQ ID NO: 579 - protein, 122 aa, Artificial Sequence
  Heavy Chain Sequence
EVQLVESGGGLVQPGGSLRLSCAASGFTFSSYDIHWVRQATGKGLEWVSAIGPAGDTYYPGSVKGRFTISRENAKNSLYLQMNSLRAGDTAVYYCARGLITFGGLIAPFDYWGQGTLVTVSS

SEQ ID NO: 580 - protein, 107 aa, Artificial Sequence
  Light Chain Sequence
EIVLTQSPGTLSLSPGERATLSCRASQSVSSTYLAWYQQKPGQAPRLLIYGASSRATGIPDRFSGSGSGTDFTLTISRLEPEDFAVYYCQHYDNSQTFGQGTKVEIK

SEQ ID NO: 581 - protein, 125 aa, Artificial Sequence
  Heavy Chain Sequence
QVQLVQSGGGLVQAGGSLRLSCAASGGTFATSPMGWLRQAPGKGTEFVAAISPSGGDRIYADSVKGRFTISRDNAGYFIYLQMNSLKPEDTAVYYCAVRRRFDGTSYYTGDYDSWGQGTLVTVSS

SEQ ID NO: 582 - protein, 108 aa, Artificial Sequence
  Light Chain Sequence
EIVLTQSPGTLSLSPGERATLSCRASQSVSSSYLAWYQQKPGQAPRLLIYDASSRATGIPDRFSGSGSGTDFTLTISRLEPEDFAVYYCQQYSYSPVTFGQGTKVEIK

SEQ ID NO: 583 - protein, 117 aa, Artificial Sequence
  Heavy Chain Sequence
QVQLVQSGAEVKKPGSSVKVSCKASGYAFTSSWMNWVRQAPGQGLEWMGRIYPGDGNTHYAQKFQGRVTLTADKSTSTAYMELSSLRSEDTAVYYCGEGYLDPMDYWGQGTLVTVSS

SEQ ID NO: 584 - protein, 107 aa, Artificial Sequence
  Light Chain Sequence
DIQMTQSPSSLSASVGDRVTITCQASQGINNYLNWYQQKPGKAPKLLIHYTSGLHAGVPSRFSGSGSGTDYTLTISSLEPEDVATYYCQQYSILPWTFGGGTKVEIK

SEQ ID NO: 585 - protein, 117 aa, Artificial Sequence
  Heavy Chain Sequence
QVQLVQSGAEVKKPGSSVKVSCKASGYEFSYYWMNWVRQAPGQGLEWMGQIYPGDGETKYAQKFQGRVTITADKSTSTAYMELSSLRSEDTAVYYCARSHGNYLPYWGQGTLVTVSS

SEQ ID NO: 586 - protein, 108 aa, Artificial Sequence
  Light Chain Sequence
EIVLTQSPATLSLSPGERATLSCRASQSVSSSYLHWYQQKPGQAPRLLIYSTSNLASGIPARFSGSGSGTDFTLTISRLEPEDFAVYYCHQYHRSPPTFGQGTKVEIK

SEQ ID NO: 587 - protein, 123 aa, Artificial Sequence [sequence omitted]

SEQ ID NO: 588 - protein, 112 aa, Artificial Sequence [sequence omitted]

SEQ ID NO: 589 - protein, 126 aa, Artificial Sequence [sequence omitted]

SEQ ID NO: 590 - protein, 107 aa, Artificial Sequence [sequence omitted]

SEQ ID NO: 591 - protein, 113 aa, Artificial Sequence [sequence omitted]

SEQ ID NO: 592 - protein, 107 aa, Artificial Sequence [sequence omitted]

SEQ ID NO: 593 - protein, 121 aa, Artificial Sequence
  Heavy Chain Sequence
EVQLVESGGGLVKPGGSLKLSCAASGYTFTSYVMHWVRQAPGKGLEWIGYINPYNDGTKYNEKFQGRVTISSDKSISTAYMELSSLRSEDTAMYYCARGTYYYGTRVFDYWGQGTLVTVSS

SEQ ID NO: 594 - protein, 112 aa, Artificial Sequence
  Light Chain Sequence
DIVMTQSPATLSLSPGERATLSCRSSKSLQNVNGNTYLYWFQQKPGQSPQLLIYRMSNLNSGVPDRFSGSGSGTEFTLTISSLEPEDFAVYYCMQHLEYPITFGAGTKLEIK

SEQ ID NO: 595 - protein, 119 aa, Artificial Sequence
  Heavy Chain Sequence
QVQLQQSGPELKKPGASVKVSCKDSGYAFSSSWMNWVRQAPGQGLEWIGRIYPGDGDTNYNGKFQGRVTITADKSSSTAYMELSSLRSEDTAVYFCARSGLLRYAMDYWGQGTLVTVSS

SEQ ID NO: 596 - protein, 107 aa, Artificial Sequence
  Light Chain Sequence
DIQMTQSPSSLSASVGDRVTITCRASQDIRNYLNWYQQKPGKAVKLLIYYTSRLLPGVPSRFSGSGSGTDYSLTISSQEQEDIGTYFCQQGNTLPWTFGQGTKVEIR

SEQ ID NO: 597 - protein, 119 aa, Artificial Sequence
  Heavy Chain Sequence
QVQLVQSGAEVKKPGSSVKVSCKASGYAFSYSWINWVRQAPGQGLEWMGRIFPGDGDTDYNGKFKGRVTITADKSTSTAYMELSSLRSEDTAVYYCARNVFDGYWLVYWGQGTLVTVSS

SEQ ID NO: 598 - protein, 112 aa, Artificial Sequence
  Light Chain Sequence
DIVMTQTPLSLPVTPGEPASISCRSSKSLLHSNGITYLYWYLQKPGQSPQLLIYQMSNLVSGVPDRFSGSGSGTDFTLKISRVEAEDVGVYYCAQNLELPYTFGGGTKVEIK

SEQ ID NO: 599 - protein, 121 aa, Artificial Sequence
  Heavy Chain Sequence
EVQLVQSGAEVKKPGESLKISCKGSGRTFTSYNMHWVRQMPGKGLEWMGAIYPLTGDTSYNQKSKLQVTISADKSISTAYLQWSSLKASDTAMYYCARSTYVGGDWQFDVWGKGTTVTVSS

SEQ ID NO: 600 - protein, 106 aa, Artificial Sequence
  Light Chain Sequence
EIVLTQSPGTLSLSPGERATLSCRASSSVPYIHWYQQKPGQAPRLLIYATSALASGIPDRFSGSGSGTDFTLTISRLEPEDFAVYYCQQWLSNPPTFGQGTKLEIK

SEQ ID NO: 601 - protein, 122 aa, Artificial Sequence [sequence omitted]

SEQ ID NO: 602 - protein, 106 aa, Artificial Sequence [sequence omitted]

SEQ ID NO: 603 - protein, 122 aa, Artificial Sequence
  Heavy Chain Sequence
EVQLVESGGGLVQPGRSLRLSCAASGFTFNDYAMHWVRQAPGKGLEWVSTISWNSGSIGYADSVKGRFTISRDNAKKSLYLQMNSLRAEDTALYYCAKDIQYGNYYYGMDVWGQGTTVTVSS

SEQ ID NO: 604 - protein, 107 aa, Artificial Sequence
  Light Chain Sequence
EIVLTQSPATLSLSPGERATLSCRASQSVSSYLAWYQQKPGQAPRLLIYDASNRATGIPARFSGSGSGTDFTLTISSLEPEDFAVYYCQQRSNWPITFGQGTRLEIK

SEQ ID NO: 605 - protein, 127 aa, Artificial Sequence
  Heavy Chain Sequence
QLQLQESGPGLVKPSETLSLTCTVSGGSINSSSYYWGWLRQSPGKGLEWIGSFFYTGSTYYNPSLRSRLTISVDTSKNQFSLMLSSVTAADTAVYYCARQSTYYYGSGNYYGWFDRWDQGTLVTVSS

SEQ ID NO: 606 - protein, 107 aa, Artificial Sequence
  Light Chain Sequence
EIVLTQSPATLSLSPGERATLSCRASQSVSSYLAWYQQKPGQAPRLLIYDASNRATGIPARFSGSGSGTDFTLTISSLEPEDFAVYYCQQRSNWPPAFGQGTKVEIK

SEQ ID NO: 607 - protein, 117 aa, Artificial Sequence
  Heavy Chain Sequence
EVQLLESGGGLVQPGGSLRLSCAASGFTFSSYAYSWVRQAPGKGLEWVSAISGSGGRTYYADSVKGRFTISRDNSKNTLYLQMNSLRAEDTAVYYCARLGYGRVDEWGRGTLVTVSS

SEQ ID NO: 608 - protein, 110 aa, Artificial Sequence
  Light Chain Sequence
QSVLTQPPSASGTPGQRVTISCSGSLSNIGRNPVNWYQQLPGTAPKLLIYLDNLRLSGVPDRFSGSKSGTSASLAISGLQSEDEADYYCATWDDSHPGWTFGGGTKLTVL

SEQ ID NO: 609 - protein, 120 aa, Artificial Sequence
  Heavy Chain Sequence
QVQLVQSGAEVKKPGASVKVSCKASGYTFTDYSMDWVRQAPGQGLEWMGAIHLNTGYTNYNQKFKGRVTMTRDTSTSTVYMELSSLRSEDTAVYYCARGFYDGYSPMDYWGQGTTVTVSS

SEQ ID NO: 610 - protein, 111 aa, Artificial Sequence
  Light Chain Sequence
DIQMTQSPSSLSASVGDRVTITCRASESVDSYGNSFMHWYQQKPGKAPKLLIYRASNLESGVPSRFSGSGSGTDFTLTISSLQPEDFATYYCQQSNEDPYTFGGGTKVEIK

SEQ ID NO: 611 - protein, 121 aa, Artificial Sequence
  Heavy Chain Sequence
QMQLVQSGAEVKKPGASVKLSCKASGYTFSSYWMHWVRQAPGQRLEWMGEINPGNGHTNYNEKFKSRVTITVDKSASTAYMELSSLRSEDTAVYYCAKIWGPSLTSPFDYWGQGTLVTVSS

SEQ ID NO: 612 - protein, 107 aa, Artificial Sequence
  Light Chain Sequence
NFMLTQPPSVSVSPGKTARITCRGDNLGDVNVHWYQQRPGQAPVLVMYYDADRPSGIPERFSGSNSGNTATLTISGVEAGDEADYYCQVWDRTSEYVFGTGTKVTVL

SEQ ID NO: 613 - protein, 120 aa, Artificial Sequence [sequence omitted]

SEQ ID NO: 614 - protein, 107 aa, Artificial Sequence [sequence omitted]

SEQ ID NO: 615 - protein, 121 aa, Artificial Sequence [sequence omitted]

SEQ ID NO: 616 - protein, 111 aa, Artificial Sequence [sequence omitted]

SEQ ID NO: 617 - protein, 118 aa, Artificial Sequence
  Heavy Chain Sequence
QVQLQQSGAELVKPGASVKLSCKASGYTFTNYDINWVRQRPEQGLEWIGWIFPGDGSTQYNEKFKGKATLTTDTSSSTAYMQLSRLTSEDSAVYFCARQTTATWFAYWGQGTLVTVSA

SEQ ID NO: 618 - protein, 107 aa, Artificial Sequence
  Light Chain Sequence
DIVMTQSPATLSVTPGDRVSLSCRASQSISDYLHWYQQKSHESPRLLIKYASQSISGIPSRFSGSGSGSDFTLSINSVEPEDVGVYYCQNGHSFPLTFGAGTKLELK

SEQ ID NO: 619 - protein, 119 aa, Artificial Sequence [sequence omitted]

SEQ ID NO: 620 - protein, 113 aa, Artificial Sequence [sequence omitted]

SEQ ID NO: 621 - protein, 124 aa, Artificial Sequence
  Heavy Chain Sequence
QVQLVQSGAEVKKPGASVKVSCKASGYTFTSYGINWVRQAPGQGLEWMGWISVYSGNTNYAQKVQGRVTMTADTSTSTAYMDLRSLRSDDTAVYYCAREGSSSSGDYYYGMDVWGQGTTVTVSS

SEQ ID NO: 622 - protein, 112 aa, Artificial Sequence
  Light Chain Sequence
DIVMTQTPLSLSVTPGQPASISCKSSQSLLHTDGTTYLYWYLQKPGQPPQLLIYEVSNRFSGVPDRFSGSGSGTDFTLKISRVEAEDVGIYYCMQNIQLPWTFGQGTKVEIK

SEQ ID NO: 623 - protein, 124 aa, Artificial Sequence
  Heavy Chain Sequence
QVQLQESGPGLVRPSQTLSLTCTASGYTFTDYVIHWVKQPPGRGLEWIGYINPYDDDTTYNQKFKGRVTMLVDTSSNTAYLRLSSVTAEDTAVYYCARRGNSYDGYFDYSMDYWGSGTPVTVSS

SEQ ID NO: 624 - protein, 108 aa, Artificial Sequence
  Light Chain Sequence
DIQMTQSPSSLSASVGDRVTITCRASQNVGTAVAWLQQTPGKAPKLLIYSASNRYTGVPSRFSGSGSGTDYTFTISSLQPEDIATYYCQQYTNYPMYTFGQGTKVQIK

SEQ ID NO: 625 - protein, 120 aa, Artificial Sequence
  Heavy Chain Sequence
QVQLVQSGAEVKKPGSSVKVSCKASGGTFSSYAISWVRQAPGQGLEWMGGIIPIFGTANYAQKFQGRVTITADESTSTAYMELSSLRSEDTAVYYCARSSYGWSYEFDYWGQGTLVTVSS

SEQ ID NO: 626 - protein, 107 aa, Artificial Sequence
  Light Chain Sequence
DIQMTQSPSSLSASVGDRVTITCRASQSIDTRLNWYQQKPGKAPKLLIYSASSLQSGVPSRFSGSGSGTDFTLTISSLQPEDFATYYCQQSAYNPITFGQGTKVEIK

SEQ ID NO: 627 - protein, 118 aa, Artificial Sequence [sequence omitted]

SEQ ID NO: 628 - protein, 108 aa, Artificial Sequence
  Light Chain Sequence
DIQMTQSPATLSLSPGERATLSCRASQSVSSYLAWYQQKPGQAPRLLIYDASNRATGIPARFSGSGSGTDFTLTISSLEPEDFAVYYCQQRSNWPMYTFGQGTKLEIK

SEQ ID NO: 629 - protein, 116 aa, Artificial Sequence; identical to SEQ ID NO: 170
  Heavy Chain Sequence

SEQ ID NO: 630 - protein, 112 aa, Artificial Sequence; identical to SEQ ID NO: 171
  Light Chain Sequence

SEQ ID NO: 631 - protein, 118 aa, Artificial Sequence
  Heavy Chain Sequence
QVQLVQSGAELKKPGASVKLSCKASGYTFTSYGISWVKQATGQGLEWIGEIYPRSGNTYYNEKFKGRATLTADKSTSTAYMELRSLRSEDSAVYFCARSTTVRPPGIWGTGTTVTVSS

SEQ ID NO: 632 - protein, 107 aa, Artificial Sequence
  Light Chain Sequence
DIQMTQSPSSLSASVGDRVTITCKASDHINNWLAWYQQKPGQAPRLLISGATSLETGVPSRFSGSGTGKDYTLTISSLQPEDFATYYCQQYWSTPYTFGGGTKVEIK

SEQ ID NO: 633 - protein, 121 aa, Artificial Sequence
  Heavy Chain Sequence
EVQLLESGGGLVQPGGSLRLSCAASGFTFSNAWMSWVRQAPGKGLEWVSSISVGGHRTYYADSVKGRSTISRDNSKNTLYLQMNSLRAEDTAVYYCARIRVGPSGGAFDYWGQGTLVTVSS

SEQ ID NO: 634 - protein, 110 aa, Artificial Sequence
  Light Chain Sequence
QSVLTQPPSASGTPGQRVTISCSGSNTNIGKNYVSWYQQLPGTAPKLLIYANSNRPSGVPDRFSGSKSGTSASLAISGLRSEDEADYYCASWDASLNGWVFGGGTKLTVL

SEQ ID NO: 635 - protein, 120 aa, Artificial Sequence
  Heavy Chain Sequence
EVQLLESGGGLVQPGGSLRLSCAASGFTFSQYGMDWVRQAPGKGLEWVSGIGPSGGSTVYADSVKGRFTISRDNSKNTLYLQMNSLRAEDTAVYYCTRGGPYYYYGMDVWGQGTTVTVSS

SEQ ID NO: 636 - protein, 107 aa, Artificial Sequence
  Light Chain Sequence
DIQMTQSPSSLSASVGDRVTITCQASQDISNYLNWYQQKPGKAPKLLIYDASNLETGVPSRFSGSGSGTDFTFTISSLQPEDIATYYCQQADSFPVTFGGGTKVEIK

SEQ ID NO: 637 - protein, 119 aa, Artificial Sequence [sequence omitted]

SEQ ID NO: 638 - protein, 110 aa, Artificial Sequence [sequence omitted]

SEQ ID NO: 639 - protein, 117 aa, Artificial Sequence [sequence omitted]

SEQ ID NO: 640 - protein, 104 aa, Artificial Sequence [sequence omitted]

SEQ ID NO: 641 - protein, 116 aa, Artificial Sequence
  Heavy Chain Sequence
EVQLVQSGAEVKKPGESLKISCKGSGYSFTGYNMNWVRQMPGKGLEWMGNIDPYYGGTTYNRKFKGQVTISADKSISTAYLQWSSLKASDTAMYYCARSVGPFDSWGQGTLVTVSS

SEQ ID NO: 642 - protein, 107 aa, Artificial Sequence
  Light Chain Sequence
EIVLTQSPATLSLSPGERATLSCRASENVYSYLAWYQQKPGQAPRLLIYFAKTLAEGIPARFSGSGSGTDFTLTISSLEPEDFAVYYCQHHSDNPWTFGQGTKVEIK

SEQ ID NO: 643 - protein, 120 aa, Artificial Sequence
  Heavy Chain Sequence
EVQLLESGGGLVQPGGSLRLSCAASGFTFNSYAMSWVRQAPGKGLEWVSIISGSGGFTYYADSVKGRFTISRDNSRTTLYLQMNSLRAEDTAVYYCAKDRLVAPGTFDYWGQGALVTVSS

SEQ ID NO: 644 - protein, 107 aa, Artificial Sequence
  Light Chain Sequence
DIQMTQSPSSLSASVGDRVTITCRASQGISSWLAWYQQKPEKAPKSLIYAASSLQSGVPSRFSGSGSGTDFTLTISSLQPEDFATYYCQQYNSYPYTFGQGTKLEIK

SEQ ID NO: 645 - protein, 113 aa, Artificial Sequence [sequence omitted]

SEQ ID NO: 646 - protein, 112 aa, Artificial Sequence [sequence omitted]

SEQ ID NO: 647 - protein, 115 aa, Artificial Sequence
  Heavy Chain Sequence
EVQLVESGGGLVQPGGSLRLSCAASGFTFSDYWMYWVRQAPGKGLEWVSEINTNGLITKYPDSVKGRFTISRDNAKNTLYLQMNSLRPEDTAVYYCARSPSGFNRGQGTLVTVSS

SEQ ID NO: 648 - protein, 115 aa, Artificial Sequence [sequence omitted]

SEQ ID NO: 649 - protein, 118 aa, Artificial Sequence
  Heavy Chain Sequence
EVQLVQSGAEVKKPGESLKISCKGSGYSFTNYWLGWVRQMPGKGLEWMGDIYPGGDYPTYSEKFKVQVTISADKSISTAYLQWSSLKASDTAMYYCARSGNYDEVAYWGQGTLVTVSS

SEQ ID NO: 650 - protein, 112 aa, Artificial Sequence
  Light Chain Sequence
DIVMTQTPLSLSVTPGQPASISCRSSQSLVHSNGNTYLHWYLQKPGQSPQLLIYKVSNRFSGVPDRFSGSGSGTDFTLKISRVEAEDVGVYYCSQSTHVPWTFGQGTKVEIK

SEQ ID NO: 651 - protein, 120 aa, Artificial Sequence
  Heavy Chain Sequence
QVTLRESGPALVKPTQTLTLTCTFSGFSLSTSGMSVGWIRQPPGKALEWLADIWWDDKKDYNPSLKSRLTISKDTSKNQVVLKVTNMDPADTATYYCARSMITNWYFDVWGAGTTVTVSS

SEQ ID NO: 652 - protein, 106 aa, Artificial Sequence
  Light Chain Sequence
DIQMTQSPSTLSASVGDRVTITCKCQLSVGYMHWYQQKPGKAPKLLIYDTSKLASGVPSRFSGSGSGTEFTLTISSLQPDDFATYYCFQGSGYPFTFGGGTKLEIK

SEQ ID NO: 653 - protein, 120 aa, Artificial Sequence
  Heavy Chain Sequence
EGQLVQSGGGLVHPGGSLRLSCAGSGFTFSSYGMHWVRQAPGKGLEWVSGIGTGGGTYSTDSVKGRFTISRDNAKNSLYLQMNSLRAEDMAVYYCARGDYYGSGSFFDCWGQGTLVTVSS

SEQ ID NO: 654 - protein, 107 aa, Artificial Sequence
  Light Chain Sequence
DIQMTQSPSSLSASVGDRVTITCRASQGISSWLAWYQQKPEKAPKSLIYAASSLQSGVPSRFSGSGSGTDFTLTISSLQPEDFATYYCQQYNSYPPTFGQGTKLEIK

SEQ ID NO: 655 - protein, 119 aa, Artificial Sequence [sequence omitted]

SEQ ID NO: 656 - protein, 107 aa, Artificial Sequence [sequence omitted]

SEQ ID NO: 657 - protein, 116 aa, Artificial Sequence
  Heavy Chain Sequence
EEQVVESGGGFVQPGGSLRLSCAASGFTFSPYWMHWVRQAPGKGLVWVSRINSDGSTYYADSVKGRFTISRDNARNTLYLQMNSLRAEDTAVYYCARDRYYGPEMWGQGTMVTVSS

SEQ ID NO: 658 - protein, 112 aa, Artificial Sequence
  Light Chain Sequence
DVVMTQSPLSLPVTLGQPASISCRSSQSLVYSDGNTYLNWFQQRPGQSPRRLIYKVSNRDSGVPDRFSGSGSGTDFTLKISRVEAEDVGVYYCMQGTHWPLTFGGGTKVEIK

SEQ ID NO: 659 - protein, 123 aa, Artificial Sequence [sequence omitted]

SEQ ID NO: 660 - protein, 112 aa, Artificial Sequence [sequence omitted]

SEQ ID NO: 661 - protein, 121 aa, Artificial Sequence
  Heavy Chain Sequence
QVQLVESGGGLVKPGESLRLSCAASGFTFSDYYMYWVRQAPGKGLEWVAIISDGGYYTYYSDIIKGRFTISRDNAKNSLYLQMNSLKAEDTAVYYCARGFPLLRHGAMDYWGQGTLVTVSS

SEQ ID NO: 662 - protein, 107 aa, Artificial Sequence
  Light Chain Sequence
DIQMTQSPSSLSASVGDRVTITCKASQNVDTNVAWYQQKPGQAPKSLIYSASYRYSDVPSRFSGSASGTDFTLTISSVQSEDFATYYCQQYDSYPYTFGGGTKLEIK

SEQ ID NO: 663 - protein, 125 aa, Artificial Sequence
  Heavy Chain Sequence (if bispec)
EVQLVESGGGLVQPGGSLKLSCAASGFTFNKYAMNWVRQAPGKGLEWVARIRSKYNNYATYYADSVKDRFTISRDDSKNTAYLQMNNLKTEDTAVYYCVRHGNFGNSYISYWAYWGQGTLVTVSS

SEQ ID NO: 664 - protein, 109 aa, Artificial Sequence
  Light Chain Sequence (if bispec)
QTVVTQEPSLTVSPGGTVTLTCGSSTGAVTSGNYPNWVQQKPGQAPRGLIGGTKFLAPGTPARFSGSLLGGKAALTLSGVQPEDEAEYYCVLWYSNRWVFGGGTKLTVL

SEQ ID NO: 665 - protein, 118 aa, Artificial Sequence
  Heavy Chain Sequence
EVQLVESGGGLVQPGGSLRLSCAASGYTFTSYVIHWVRQAPGKGLEWVGYNNPYNAGTNYNEKFKGRFTISSDKSKNTAYLQMNSLRAEDTAVYYCSRPTMLPWFAYWGQGTLVTVSS

SEQ ID NO: 666 - protein, 107 aa, Artificial Sequence
  Light Chain Sequence
DIQMTQSPSSLSASVGDRVTITCRASQAVSSAVAWYQQKPGKAPKLLIYSASHRYTGVPSRFSGSGSGTDFTLTISSLQPEDFATYYCQESYSTPWTFGQGTKVEIK

SEQ ID NO: 667 - protein, 117 aa, Artificial Sequence [sequence omitted]

SEQ ID NO: 668 - protein, 113 aa, Artificial Sequence [sequence omitted]

SEQ ID NO: 669 - protein, 120 aa, Artificial Sequence [sequence omitted]

SEQ ID NO: 670 - protein, 111 aa, Artificial Sequence [sequence omitted]

SEQ ID NO: 671 - protein, 118 aa, Artificial Sequence
  Heavy Chain Sequence
QVQLVQSGAEVKKPGSSVKVSCKASGYSFSDYYMHWVRQAPGQGLEWMGQINPTTGGASYNQKFKGKATITVDKSTSTAYMELSSLRSEDTAVYYCARYYYGRHFDVWGQGTTVTVSS

SEQ ID NO: 672 - protein, 111 aa, Artificial Sequence
  Light Chain Sequence
DIVMTQSPDSLAVSLGERATINCKASQSVDYDGDSYMNWYQQKPGQPPKLLIYAASNLESGVPDRFSGSGSGTDFTLTISSLQAEDVAVYYCQQSNEDPYTFGQGTKLEIK

SEQ ID NO: 673 - protein, 122 aa, Artificial Sequence
  Heavy Chain Sequence
EVQLVESGGGLVQPGGSLRLSCAASGFTFSDYTMLWVRQAPGKGLEWVAIIKSGGSYSYYPDSVKGRFTISRDNAKNSLYLQMNSLRAEDTAVYYCARDGDYGSSYGAMDYWGQGTLVTVSS

SEQ ID NO: 674 - protein, 108 aa, Artificial Sequence
  Light Chain Sequence
DIQMTQSPSSLSASVGDRVTITCRASQDINSYLSWFQQKPGKAPKSLIVRANRLVDGVPSRFSGSGSGQDYSLTISSLQPEDFATYYCLQYDAFPPYTFGQGTKLEIK

SEQ ID NO: 675 - protein, 119 aa, Artificial Sequence [sequence omitted]

SEQ ID NO: 676 - protein, 107 aa, Artificial Sequence [sequence omitted]

SEQ ID NO: 677 - protein, 117 aa, Artificial Sequence
  Heavy Chain Sequence
QVQLVQSGSELKKPGASVKISCKASGYTFTNYGMNWVRQAPGQGLQWMGWINTDSGESTYAEEFKGRFVFSLDTSVNTAYLQITSLTAEDTGMYFCVRVGYDALDYWGQGTLVTVSS

SEQ ID NO: 678 - protein, 106 aa, Artificial Sequence
  Light Chain Sequence
EIVLTQSPSSLSASVGDRVTITCSARSSVSYMHWFQQKPGKAPKLWIYRTSNLASGVPSRFSGSGSGTSYCLTINSLQPEDFATYYCQQRSSFPLTFGGGTKLEIK

SEQ ID NO: 679 - protein, 120 aa, Artificial Sequence
  Heavy Chain Sequence
EVQLVESGGGLVQPGGSLRLSCAASGYEFSRSWMNWVRQAPGKGLEWVGRIYPGDGDTNYSGKFKGRFTISADTSKNTAYLQMNSLRAEDTAVYYCARDGSSWDWYFDVWGQGTLVTVSS

SEQ ID NO: 680 - protein, 112 aa, Artificial Sequence
  Light Chain Sequence
DIQMTQSPSSLSASVGDRVTITCRSSQSIVHSVGNTFLEWYQQKPGKAPKLLIYKVSNRFSGVPSRFSGSGSGTDFTLTISSLQPEDFATYYCFQGSQFPYTFGQGTKVEIK

SEQ ID NO: 681 - protein, 107 aa, Artificial Sequence
  Light Chain Sequence
DIQMTQSPSSLSASVGDRVTITCRASQAIDSYLHWYQQKPGKAPKLLIYSASNLETGVPSRFSGSGSGTDFTLTISSLLPEDFATYYCQQVVWRPFTFGQGTKVEIK

SEQ ID NO: 682 - protein, 121 aa, Artificial Sequence
  Heavy Chain Sequence
QVQLVQSGAEVKKPGASVKVSCKASGYTFTSYNMHWVRQAPGQGLEWMGAIYPGNGDTSYNQKFQGRVTITADKSISTAYMELSSLRSEDTAVYYCARSTYYGGDWYFNVWGAGTLVTVSS

SEQ ID NO: 683 - protein, 106 aa, Artificial Sequence
  Light Chain Sequence
QIVLTQSPSSLSASVGDRVTITCRASSSVSYIHWFQQKPGKSPKPLIYATSNLASGVPVRFSGSGSGTDYTLTISSLQPEDFATYYCQQWTSNPPTFGGGTKVEIK

SEQ ID NO: 684 - protein, 125 aa, Artificial Sequence
  Heavy Chain Sequence (if bispec)
EVQLVESGGGLVQPGGSLRLSCAASGFTFSTYAMNWVRQAPGKGLEWVGRIRSKYNNYATYYADSVKGRFTISRDDSKNTLYLQMNSLRAEDTAVYYCVRHGNFGDSYVSWFAYWGQGTLVTVSS

SEQ ID NO: 685 - protein, 112 aa, Artificial Sequence
  Light Chain Sequence (if bispec)
QAVVTQEPSLTVSPGGTVTLTCGSSTGAVTTSNYANWVQQKPGKSPRGLIGGTNKRAPGVPARFSGSLLGGKAALTISGAQPEDEADYYCALWYSNHWVFGGGTKLTVLEPK

SEQ ID NO: 686 - protein, 117 aa, Artificial Sequence
  Heavy Chain Sequence
EVQLVESGGGLVKPGGSLRLSCAASGFTFSAYAMNWVRQAPGKGLEWVGRIRTKNNNYATYYADSVKDRFTISRDDSKNTLYLQMNSLKTEDTAVYYCTTFYGNGVWGQGTLVTVSS

SEQ ID NO: 687 - protein, 112 aa, Artificial Sequence
  Light Chain Sequence
DVVMTQSPLSLPVTLGQPASISCKSSQSLLDSDGKTFLNWFQQRPGQSPRRLIYLVSKLDSGVPDRFSGSGSGTDFTLKISRVEAEDVGVYYCWQGTHFPYTFGQGTRLEIK

SEQ ID NO: 688 - protein, 117 aa, Artificial Sequence [sequence omitted]

SEQ ID NO: 689 - protein, 111 aa, Artificial Sequence [sequence omitted]

SEQ ID NO: 690 - protein, 116 aa, Artificial Sequence
  Heavy Chain Sequence
QVQLVQSGAEVKKPGASVKVSCKASGYYTEAYYIHWVRQAPGQGLEWMGRIDPATGNTKYAPRLQDRVTMTRDTSTSTVYMELSSLRSEDTAVYYCASLYSLPVYWGQGTTVTVSS

SEQ ID NO: 691 - protein, 112 aa, Artificial Sequence
  Light Chain Sequence
DVVMTQSPLSLPVTLGQPASISCKSSQSLLYSDAKTYLNWFQQRPGQSPRRLIYQISRLDPGVPDRFSGSGSGTDFTLKISRVEAEDVGVYYCLQGTHYPVLFGQGTRLEIK

SEQ ID NO: 692 - protein, 121 aa, Artificial Sequence
  Heavy Chain Sequence
EVQLQESGGGLMQPGGSMKLSCVASGFTFSNYWMNWVRQSPEKGLEWVAEIRLKSNNYATHYAESVKGRFTISRDDSKRSVYLQMNTLRAEDTGIYYCTRGNGNYRAMDYWGQGTSVTVSS

SEQ ID NO: 693 - protein, 107 aa, Artificial Sequence
  Light Chain Sequence
DIQMTQSPASLSVSVGETVSITCRASENIYSSLAWYQQKQGKSPQLLVYSATILADGVPSRFSGSGSGTQYSLKINSLQSEDFGTYYCQHFWGTPYTFGGGTKLEIK

SEQ ID NO: 694 - protein, 116 aa, Artificial Sequence
  Heavy Chain Sequence
EVQLVESGGGLVQPGGSLRLSCAASGFTFSNYGMSWVRQAPGKGLEWVASISSGGGSTYYPDNVKGRFTISRDDAKNSLYLQMNSLRAEDTAVYYCARGGAGIDYWGQGTLVTVSS

SEQ ID NO: 695 - protein, 113 aa, Artificial Sequence
  Light Chain Sequence
DIQMTQSPSSLSASVGDRVTITCKSIQTLLYSSNQKNYLAWFQQKPGKAPKLLIYWASIRKSGVPSRFSGSGSGTDFTLTISSLQPEDLATYYCQQYYSYPLTFGGGTKLEIK

SEQ ID NO: 696 - protein, 121 aa, Artificial Sequence
  Heavy Chain Sequence
EVQLVESGGGLVQPGGSLRLSCAASGFTFSSYWMSWVRQAPGKGLEWVAYIKQDGNEKYYVDSVKGRFTISRDNAKNSLYLQMNSLRAEDTAVYYCAREGILWFGDLPTFWGQGTLVTVSS

SEQ ID NO: 697 - protein, 107 aa, Artificial Sequence
  Light Chain Sequence
DIQMTQSPSSLSASVGDRVTITCRASQGISNWLAWYQQKPEKAPKSLIYAASSLQSGVPSRFSGSGSGTDFTLTISSLQPEDFATYYCQQYDSYPRTFGQGTKVEIK

SEQ ID NO: 698 - protein, 122 aa, Artificial Sequence
  Heavy Chain Sequence
QVQLQESGAELVRSGASVRMSCKASGYTFTSYNMHWVKQTPGQGLEWIGYIYPGNGGTNYIQKFKGKAILTADTSSSTAYMQISSLTSEDSAVYFCTRSPSHYSSDPYFDYWGQGTTLTVSS

SEQ ID NO: 699 - protein, 107 aa, Artificial Sequence
  Light Chain Sequence
DIVMSQSHKFMSTSVGDRVSITCKASQDVGTAVAWYQQNPGQSPKFLIYWASTRHTGVPDRFTGSGSGTDFTLTITNVQSEDLADYFCQQYSSYPLTFGAGTSLELK

SEQ ID NO: 700 - protein, 129 aa, Artificial Sequence
  Heavy Chain Sequence
QVQLVQSGGGLVQPGGSLRLSCAASGFTFSSYWMYWVRQVPGKGLEWVSAIDTGGGRTYYADSVKGRFAISRVNAKNTMYLQMNSLRAEDTAVYYCARDEGGGTGWGVLKDWPYGLDAWGQGTLVTVSS

SEQ ID NO: 701 - protein, 106 aa, Artificial Sequence
  Light Chain Sequence
QPVLTQPLSVSVALGQTARITCGGNNIGSKNVHWYQQKPGQAPVLVIYRDSNRPSGIPERFSGSNSGNTATLTISRAQAGDEADYYCQVWDSSTAVFGTGTKLTVL

SEQ ID NO: 702 - protein, 119 aa, Artificial Sequence
  Heavy Chain Sequence
QVQLVQSGAEVKKPGASVKVSCKASGYTFTNYYIHWVKQAPGQGLEWIGWIYPGDGSPKFNERFKGRTTLTADKSTNTAYMLLSSLRSEDTAVYFCATGPTDGDYFDYWGQGTTVTVSS

SEQ ID NO: 703 - protein, 107 aa, Artificial Sequence
  Light Chain Sequence
DIQMTQSPSSLSASVGDRVTITCRASGNIHNFLAWYQQKPGKAPKLLIYNEKTLADGVPSRFSGSGSGTDYTLTISSLQPEDFATYFCQQFWSTPYTFGGGTKVEIK

SEQ ID NO: 704 - protein, 117 aa, Artificial Sequence
  Heavy Chain Sequence
EVQLVESGGGLVQPGGSLRLSCAASGFTFSDYGIAWVRQAPGKGLEWVAFISDLAYTIYYADTVTGRFTISRDNSKNTLYLQMNSLRAEDTAVYYCARDNWDAMDYWGQGTLVTVSS

SEQ ID NO: 705 - protein, 112 aa, Artificial Sequence
  Light Chain Sequence
DIQMTQSPSSLSASVGDRVTITCRSSQSLVHNNANTYLHWYQQKPGKAPKLLIYKVSNRFSGVPSRFSGSGSGTDFTLTISSLQPEDFATYYCSQNTLVPWTFGQGTKVEIK

SEQ ID NO: 706 - protein, 121 aa, Artificial Sequence
  Heavy Chain Sequence
QVQLQQSGAELVKPGASVKLSCKASGYTFTSYDINWVRQRPEQGLEWIGWIFPGDGSTKYNEKFKGKATLTTDKSSSTAYMQLSRLTSEDSAVYFCAREDYYDNSYYFDYWGQGTTLTVSS

SEQ ID NO: 707 - protein, 107 aa, Artificial Sequence
  Light Chain Sequence
DIQMTQTTSSLSASLGDRVTISCRASQDISNYLNWYQQKPDGTVKLLIYYTSRLHSGVPSRFSGSGSGTDYSLTISNLEQEDIATYFCQQGNTLPWTFGGGTKLEIK

SEQ ID NO: 708 - protein, 116 aa, Artificial Sequence [sequence omitted]

SEQ ID NO: 709 - protein, 108 aa, Artificial Sequence [sequence omitted]

SEQ ID NO: 710 - protein, 127 aa, Artificial Sequence
  Heavy Chain Sequence
QVQLVQSGAEVKKPGSSVKVSCKASGGTFNRYTVNWVRQAPGQGLEWMGGIIPIFGTANYAQRFQGRLTITADESTSTAYMELSSLRSDDTAVYFCARENLDNSGTYYYFSGWFDPWGQGTLVTVSS

SEQ ID NO: 711 - protein, 112 aa, Artificial Sequence
  Light Chain Sequence
QSALTQPRSVSGSPGQSVTISCTGTSSDIGGYNFVSWYQQHPGKAPKLMIYDATKRPSGVPDRFSGSKSGNTASLTISGLQAEDEADYYCCSYAGDYTPGVVFGGGTKLTVL

SEQ ID NO: 712 - protein, 118 aa, Artificial Sequence [sequence omitted]

SEQ ID NO: 713 - protein, 107 aa, Artificial Sequence [sequence omitted]

SEQ ID NO: 714 - protein, 116 aa, Artificial Sequence [sequence omitted]

SEQ ID NO: 715 - protein, 107 aa, Artificial Sequence [sequence omitted]

SEQ ID NO: 716 - protein, 122 aa, Artificial Sequence
  Heavy Chain Sequence
EVQLVESGGGLVQPGGSLRLSCVASGFSLTNNNVNWVRQAPGKGLEWVGGVWAGGATDYNSALKSRFTISRDNAKNTVFLQMHSLRSEDTAVYYCARDGGYSSSTLYAMDAWGQGTSVTVSS

SEQ ID NO: 717 - protein, 107 aa, Artificial Sequence
  Light Chain Sequence
DIVMTQSPASLSLSQGETVTITCRASEDIYNALAWYQQKPGQAPKLLIYNTDTLHTGVPSRFSGSGSGTDFSLTISSLEPEDVAVYYCQHYFHYPRTFGQGTKVELK

SEQ ID NO: 718 - protein, 123 aa, Artificial Sequence [sequence omitted]

SEQ ID NO: 719 - protein, 107 aa, Artificial Sequence [sequence omitted]

SEQ ID NO: 720 - protein, 116 aa, Artificial Sequence
  Heavy Chain Sequence
EVQLVESGGGLVKPGGSLRLSCAASGFTFSDYGMNWVRQAPGKGLEWIAYISSGRGNIYYADTVKGRFTISRDNAKNSLYLQMNSLRAEDTAVYYCARSWGYFDVWGQGTTVTVSS

SEQ ID NO: 721 - protein, 113 aa, Artificial Sequence
  Light Chain Sequence
DIVMTQSPDSLAVSLGERATINCKSSQSLLNRGNQKNYLTWFQQKPGQPPKLLIYWASTRESGVPDRFSGSGSGTDFTLTISSLQAEDVAVYYCQNDYTYPLTFGQGTKLEIK

SEQ ID NO: 722 - protein, 122 aa, Artificial Sequence [sequence omitted]

SEQ ID NO: 723 - protein, 107 aa, Artificial Sequence [sequence omitted]

SEQ ID NO: 724 - protein, 126 aa, Artificial Sequence
  Heavy Chain Sequence
QVQLVQSGSELKKPGASVKVSCKASGYTFTNYGMNWVRQAPGQGLEWMGWINTYTGEPTYADDFTGRFVFSLDTSVSTAYLQISSLKAEDTAVYYCARNPINYYGINYEGYVMDYWGQGTLVTVSS

SEQ ID NO: 725 - protein, 112 aa, Artificial Sequence
  Light Chain Sequence
DIVMTQSPDSLAVSLGERATINCKSSHSVLYSSNQKNYLAWYQQKPGQPPKLLIYWASTRESGVPDRFSGSGSGTDFTLTISSLQAEDVAVYYCHQYLSSLTFGQGTKLEIK

SEQ ID NO: 726 - protein, 120 aa, Artificial Sequence
  Heavy Chain Sequence
QVQLQQWGAGLLKPSETLSLTCAVYGGSFSDYYWNWIRQPPGKGLEWIGEINHRGSTNSNPSLKSRVTLSLDTSKNQFSLKLRSVTAADTAVYYCAFGYSDYEYNWFDPWGQGTLVTVSS

SEQ ID NO: 727 - protein, 107 aa, Artificial Sequence
  Light Chain Sequence
EIVLTQSPATLSLSPGERATLSCRASQSISSYLAWYQQKPGQAPRLLIYDASNRATGIPARFSGSGSGTDFTLTISSLEPEDFAVYYCQQRSNWPLTFGQGTNLEIK

SEQ ID NO: 728 - protein, 118 aa, Artificial Sequence
  Heavy Chain Sequence
DVQLVESGGDLVKPGGSLRLTCVASGFTYSNYWMHWVRQAPGKGLQWVARIDPYGGGTKHNEKFKRRFTISRDNAKNTLYLQMNSLKTEDTATYYCVRSGYDYYFDVWGQGTLVTVSS

SEQ ID NO: 729 - protein, 107 aa, Artificial Sequence
  Light Chain Sequence
EIQMTQSPSSLSASPGDRVTITCRASENIYSFLAWYQQKPGKVPKLLIYNANTLAEGVPSRFSGSGSGTDFTLTISSLEPEDAATYYCQHHFGTPFTFGSGTKLEIK

SEQ ID NO: 730 - protein, 121 aa, Artificial Sequence [sequence omitted]

SEQ ID NO: 731 - protein, 107 aa, Artificial Sequence [sequence omitted]

SEQ ID NO: 732 - protein, 126 aa, Artificial Sequence
  Heavy Chain Sequence (if bispec)
EVQLVQSGAEVKKPGSSVKVSCKASGGSFGGYGIGWVRQAPGQGLEWMGGITPFFGFADYAQKFQGRVTITADESTTTAYMELSGLTSDDTAVYYCARDPNEFWNGYYSTHDFDSWGQGTTVTVSS

SEQ ID NO: 733 - protein, 107 aa, Artificial Sequence
  Light Chain Sequence (if bispec)
EIVLTQSPDFQSVTPKEKVTITCRASQDIGSELHWYQQKPDQPPKLLIKYASHSTSGVPSRFSGSGSGTDFTLTINGLEAEDAGTYYCHQTDSLPYTFGPGTKVDIK

SEQ ID NO: 734 - protein, 116 aa, Artificial Sequence [sequence omitted]

SEQ ID NO: 735 - protein, 107 aa, Artificial Sequence [sequence omitted]

SEQ ID NO: 736 - protein, 120 aa, Artificial Sequence
  Heavy Chain Sequence
QVQLQESGPGLVKPSETLSLTCTVSGGSISIYYWSWIRQPPGKGLEWIGYVYYSGSTNYNPSLKSRVTISVDTSKNQFSLKLNSVTAADTAVYYCARGGYDFWSGYFDYWGQGTLVTVSS

SEQ ID NO: 737 - protein, 108 aa, Artificial Sequence
  Light Chain Sequence
EIVMTQSPATLSVSPGERATLSCRASQSVDSNLAWYRQKPGQAPRLLIYGASTRATGIPARFSGSGSGTEFTLTISSLQSEDFAVYYCQQYINWPPITFGQGTRLEIK

SEQ ID NO: 738 - protein, 122 aa, Artificial Sequence
  Heavy Chain Sequence
QLQLQESGPGLVKPSETLSLTCTVSGGSITSSSYYWGWIRQPPGKGLEWIGSIYYRGSTNYNPSLKSRVTISVDSSKNQFYLKVSSVTAVDTAVYYCARQNGAARPSWFDPWGQGTLVTVSS

SEQ ID NO: 739 - protein, 108 aa, Artificial Sequence
  Light Chain Sequence
EIVLTQSPDTISLSPGERATLSCRASQSISSIYLAWYQQKPGQAPRLLIYGASSRVTGIPDRFSVSGSGTDFTLTISRLEPEDFAVYYCQHYGISPFTFGPGTKVDIR

SEQ ID NO: 740 - protein, 120 aa, Artificial Sequence
  Heavy Chain Sequence
QVQLVQSGAEVKKPGSSVKVSCKASGYTFTDQTIHWMRQAPGQGLEWIGYIYPRDDSPKYNENFKGKVTITADKSTSTAYMELSSLRSEDTAVYYCAIPDRSGYAWFIYWGQGTLVTVSS

SEQ ID NO: 741 - protein, 107 aa, Artificial Sequence
  Light Chain Sequence
DIQMTQSPSSLSASVGDRVTITCKASRDVAIAVAWYQQKPGKVPKLLIYWASTRHTGVPSRFSGSGSRTDFTLTISSLQPEDVADYFCHQYSSYPFTFGSGTKLEIK

SEQ ID NO: 742 - protein, 121 aa, Artificial Sequence [sequence omitted]

SEQ ID NO: 743 - protein, 106 aa, Artificial Sequence [sequence omitted]

SEQ ID NO: 744 - protein, 124 aa, Artificial Sequence
  Heavy Chain Sequence
EVQLVESGGGVVQPGRSLRLSCAASGFTFSNYPMHWVRQAPGKGLEWVAVISYDGSEKWYADSVKGRFTISRDNSKNTLYLEMNSLRPEDTAVYYCARNRGDIYYDFTYAMDIWGQGTTVTVSS

SEQ ID NO: 745 - protein, 107 aa, Artificial Sequence
  Light Chain Sequence
DIQLTQSPSTLSASVGDSVTITCRASEGVDRWLAWYQQKPGRAPKLLIYDASTLQSGVPSRFSGSGSGTEFSLTISSLQPDDVATYYCQHFWGTPYTFGQGTKLEIK

SEQ ID NO: 746 - protein, 118 aa, Artificial Sequence [sequence omitted]

SEQ ID NO: 747 - protein, 107 aa, Artificial Sequence [sequence omitted]

SEQ ID NO: 748 - protein, 126 aa, Artificial Sequence
  Heavy Chain Sequence
QVQLVESGGGVVQPGRSLRLSCTASGFTFKNYAMHWVRQAPAKGLEWVATISYDGRNIQYADSVKGRFTFSRDNSQDTLYLQLNSLRPEDTAVYYCARPVRSRWLQLGLEDAFHIWGQGTMVTVSS

SEQ ID NO: 749 - protein, 107 aa, Artificial Sequence
  Light Chain Sequence
AIRMTQSPSSFSASTGDRVTITCRASQDIRNYVAWYQQKSGKAPKFLIYAASTLQSGVPSRFSGSGSGTDFTLTINSLQSEDFATYYCQQYYNSPPTFGQGTRVEIT

SEQ ID NO: 750 - protein, 120 aa, Artificial Sequence
  Heavy Chain Sequence
EVQLVQSGAEVKKPGSSVKVSCKASGYTFTTYWMHWVRQAPGQGLEWIGEIDPSDSYSNYNQKFKDRATLTVDKSTSTAYMELSSLRSEDTAVYYCARNGGLGPAWFSYWGQGTLVTVSS

SEQ ID NO: 751 - protein, 107 aa, Artificial Sequence
  Light Chain Sequence
DIQMTQSPSSVSASVGDRVTITCKASQYVGTAVAWYQQKPGKSPKLLIYSASNRYTGVPSRFSDSGSGTDFTLTISSLQPEDFATYFCQQYSSYPWTFGGGTKVEIK

SEQ ID NO: 752 - protein, 118 aa, Artificial Sequence
  Heavy Chain Sequence
EVQLKESGPGLVAPGGSLSITCTVSGFSLTDSSINWVRQPPGKGLEWLGMIWGDGRIDYADALKSRLSISKDSSKSQVFLEMTSLRTDDTATYYCARDGYFPYAMDFWGQGTSVTVSS

SEQ ID NO: 753 - protein, 111 aa, Artificial Sequence
  Light Chain Sequence
DIVLTQSPASLAVSLGQRATISCRASESVDSYGQSYMHWYQQKAGQPPKLLIYLASNLESGVPARFSGSGSRTDFTLTIDPVQAEDAATYYCQQNAEDSRTFGGGTKLEIK

SEQ ID NO: 754 - protein, 123 aa, Artificial Sequence
  Heavy Chain Sequence (if bispec)
QVQLQQSGPELVKPGASVKISCKASGYSFTSYWIHWIKQRPGQGLEWIGMIDPSDGETRLNQRFQGRATLTVDESTSTAYMQLRSPTSEDSAVYYCTRLKEYGNYDSFYFDVWGAGTLVTVSS

SEQ ID NO: 755 - protein, 107 aa, Artificial Sequence
  Light Chain Sequence (if bispec)
DIQMTQSPASLSVSVGDTITLTCHASQNIDVWLSWFQQKPGNIPKLLIYKASNLHTGVPSRFSGSGSGTGFTLTISSLQPEDIATYYCQQAHSYPFTFGGGTKLEIK

SEQ ID NO: 756 - protein, 123 aa, Artificial Sequence [sequence omitted]

SEQ ID NO: 757 - protein, 107 aa, Artificial Sequence [sequence omitted]

SEQ ID NO: 758 - protein, 117 aa, Artificial Sequence [sequence omitted]

SEQ ID NO: 759 - protein, 111 aa, Artificial Sequence [sequence omitted]

SEQ ID NO: 760 - protein, 117 aa, Artificial Sequence
  Heavy Chain Sequence
QVQLVQSGAEVKKPGASVKVSCKASGYTFTDYSIHWVRQAPGQGLEWIGYIYPSNGDSGYNQKFKNRVTMTRDTSTSTAYMELSRLRSEDTAVYYCATYFANNFDYWGQGTTLTVSS

SEQ ID NO: 761 - protein, 111 aa, Artificial Sequence
  Light Chain Sequence
DIQMTQSPSSLSASVGDRVTITCKASQSVDYDGDSYMNWYQQKPGKAPKLLIYAASNLESGVPSRFSGSGSGTDFTLTISPVQAEDFATYYCQQSNEDPLTFGAGTKLELK

SEQ ID NO: 762 - protein, 118 aa, Artificial Sequence
  Heavy Chain Sequence
QVQLVQSGAEVKKPGASVKVSCKASGYTFTNYGMNWVRQAPGQGLEWMGWINTYTGEPTYADDFKGRVTMTTDTSTSTAYMELRSLRSDDTAVYYCARIGDSSPSDYWGQGTLVTVSS

SEQ ID NO: 763 - protein, 107 aa, Artificial Sequence
  Light Chain Sequence
EIVMTQSPATLSVSPGERATLSCKASQSVSNDVVWYQQKPGQAPRLLIYYASNRYTGIPARFSGSGSGTEFTLTISSLQSEDFAVYYCQQDYTSPWTFGQGTKLEIK

SEQ ID NO: 764 - protein, 117 aa, Artificial Sequence [sequence omitted]

SEQ ID NO: 765 - protein, 112 aa, Artificial Sequence [sequence omitted]

SEQ ID NO: 766 - protein, 121 aa, Artificial Sequence; identical to SEQ ID NO: 696
  Heavy Chain Sequence

SEQ ID NO: 767 - protein, 107 aa, Artificial Sequence; identical to SEQ ID NO: 697
  Light Chain Sequence

SEQ ID NO: 768 - protein, 118 aa, Artificial Sequence
  Heavy Chain Sequence
QVQLVQSGAEVVKPGASVKLSCKASGYIFTSYYMYWVKQAPGQGLEWIGEINPSNGDTNFNEKFKSKATLTVDKSASTAYMELSSLRSEDTAVYYCTRSDGRNDMDSWGQGTLVTVSS

SEQ ID NO: 769 - protein, 111 aa, Artificial Sequence
  Light Chain Sequence
DIVLTQSPATLSVSPGERATISCRASQRVSSSTYSYMHWYQQKPGQPPKLLIKYASNLESGVPARFSGSGSGTDFTLTISSVEPEDFATYYCQHSWEIPPTFGGGTKLEIK

SEQ ID NO: 770 - protein, 121 aa, Artificial Sequence
  Heavy Chain Sequence
QVQLQQSGSELKKPGASVKVSCKASGYTFTNYGMNWVKQAPGQGLKWMGWINTYTGEPTYTDDFKGRFAFSLDTSVSTAYLQISSLKADDTAVYFCARGGFGSSYWYFDVWGQGSLVTVSS

SEQ ID NO: 771 - protein, 107 aa, Artificial Sequence
  Light Chain Sequence
DIQLTQSPSSLSASVGDRVSITCKASQDVSIAVAWYQQKPGKAPKLLIYSASYRYTGVPDRFSGSGSGTDFTLTISSLQPEDFAVYYCQQHYITPLTFGAGTKVEIK

SEQ ID NO: 772 - protein, 117 aa, Artificial Sequence
  Heavy Chain Sequence
QVQLQQSGSELKKPGASVKISCKASGYSFTDYIILWVRQNPGKGLEWIGHIDPYYGSSNYNLKFKGRVTITADQSTTTAYMELSSLRSEDTAVYYCGRSKRDYFDYWGQGTTLTVSS

SEQ ID NO: 773 - protein, 107 aa, Artificial Sequence
  Light Chain Sequence
DIQMTQSPSSLSASIGDRVTITCKASQDINSYLSWFQQKPGKAPKLLIYRANRLVDGVPSRFSGSGSGTDYTLTISSLQPEDFAVYYCLQYDEFPYTFGGGTKLEIK

SEQ ID NO: 774 - protein, 120 aa, Artificial Sequence
  Heavy Chain Sequence
EVQLVQSGAEVKKPGASVKVSCKASGYKFSSYWIEWVKQAPGQGLEWIGEILPGSDTTNYNEKFKDRATFTSDTSINTAYMELSRLRSDDTAVYYCARDRGNYRAWFGYWGQGTLVTVSS

SEQ ID NO: 775 - protein, 107 aa, Artificial Sequence
  Light Chain Sequence
DIQMTQSPSSLSASVGDRVTITCRASQDISNYLNWYQQKPGGAVKFLIYYTSRLHSGVPSRFSGSGSGTDYTLTISSLQPEDFATYFCQQGEALPWTFGGGTKVEIK

SEQ ID NO: 776 - protein, 116 aa, Artificial Sequence
  Heavy Chain Sequence
EVQLVESGGGLVQPGRSLRLSCAASRFTFDDYAMHWVRQAPGKGLEWVSGISWNSGRIGYADSVKGRFTISRDNAENSLFLQMNGLRAEDTALYYCAKGRDSFDIWGQGTMVTVSS

SEQ ID NO: 777 - protein, 107 aa, Artificial Sequence
  Light Chain Sequence
DIQMTQSPSSVSASVGDRVTITCRASQGISSWLAWYQQKPGKAPKLLIYGASSLESGVPSRFSGSGSGTDFTLTISSLQPEDFASYYCQQANSFPYTFGQGTKLEIK

SEQ ID NO: 778 - protein, 119 aa, Artificial Sequence
  Heavy Chain Sequence
QVQLQESGPGLVKPSETLSLTCAVSGHSISHDHAWSWVRQPPGEGLEWIGFISYSGITNYNPSLQGRVTISRDNSKNTLYLQMNSLRAEDTAVYYCARSLARTTAMDYWGEGTLVTVSS

SEQ ID NO: 779 - protein, 107 aa, Artificial Sequence
  Light Chain Sequence
DIQMTQSPSSLSASVGDSVTITCQASTDISSHLNWYQQKPGKAPELLIYYGSHLLSGVPSRFSGSGSGTDFTFTISSLEAEDAATYYCGQGNRLPYTFGQGTKVEIE

SEQ ID NO: 780 - protein, 127 aa, Artificial Sequence [sequence omitted]

SEQ ID NO: 781 - protein, 108 aa, Artificial Sequence [sequence omitted]

SEQ ID NO: 782 - protein, 126 aa, Artificial Sequence
  Heavy Chain Sequence
QVQLVQSGAEVKKPGASVKVSCKASGYTFTGYYMHWVRQAPGQGLEWMGWINPDSGGTNYAQKFQGRVTMTRDTSISTAYMELNRLRSDDTAVYYCARDQPLGYCTNGVCSYFDYWGQGTLVTVSS

SEQ ID NO: 783 - protein, 107 aa, Artificial Sequence
  Light Chain Sequence
DIQMTQSPSSVSASVGDRVTITCRASQGIYSWLAWYQQKPGKAPNLLIYTASTLQSGVPSRFSGSGSGTDFTLTISSLQPEDFATYYCQQANIFPLTFGGGTKVEIK

SEQ ID NO: 784 - protein, 117 aa, Artificial Sequence
  Heavy Chain Sequence
EVQLVESGGGLVQPGGSLRLSCAASGLIFRSYGMSWVRQAPGKGLEWVATINSGGTYTYYPDSVKGRFTISRDNSKNTLYLQMNSLRAEDTAVYYCANSYSGAMDYWGQGTLVTVSS

SEQ ID NO: 785 - protein, 112 aa, Artificial Sequence
  Light Chain Sequence
DDVLTQTPLSLPVTPGQPASISCRSSQSIVHSNGNTYLEWYLQKPGQSPQLLIYKVSNRFSGVPDRFSGSGSGTDFTLKISRVEAEDVGVYYCFQGSLVPWTFGQGTKVEIK

SEQ ID NO: 786 - protein, 119 aa, Artificial Sequence [sequence omitted]

SEQ ID NO: 787 - protein, 111 aa, Artificial Sequence [sequence omitted]

SEQ ID NO: 788 - protein, 119 aa, Artificial Sequence
  Heavy Chain Sequence
EVQLQQPGPELEKPGASVKLSCKASGYSFTDYNMNWVKQNNGESLEWIGKIDPYYGGPSYNQKFKDKATLTVDKSSSTAYMQLKSLTSEDSAVYYCTRGGNRDWYFDVWGAGTTLTVSA

SEQ ID NO: 789 - protein, 113 aa, Artificial Sequence
  Light Chain Sequence
DIVLSQSPSSLVVSVGEKVTMSCKSSQSLLYSRNQKNYLAWYQQKPGQSPKVLIYWASTRESGVPDRLTGSGSGTDFTLTISSVKAEDLAVYYCQQYYSYPLTFGAGTKLELK

SEQ ID NO: 790 - protein, 117 aa, Artificial Sequence
  Heavy Chain Sequence
QVQLVESGGGLVQPGGSLRLSCAASGFTFRSHWLSWVRQAPGKGLEWVSNINYDGSSTYYADSVKGRFTISRDNSKNTLYLQMNSLRAEDTAVYYCARDTYLHFDYWGQGTLVTVSS

SEQ ID NO: 791 - protein, 111 aa, Artificial Sequence
  Light Chain Sequence
DIALTQPASVSGSPGQSITISCTGTSSDVGDINDVSWYQQHPGKAPKLMIYDVNNRPSGVSNRFSGSKSGNTASLTISGLQAEDEADYYCQSYAGSYLSEVFGGGTKLTVL

SEQ ID NO: 792 - protein, 116 aa, Artificial Sequence [sequence omitted]

SEQ ID NO: 793 - protein, 108 aa, Artificial Sequence [sequence omitted]

SEQ ID NO: 794 - protein, 119 aa, Artificial Sequence [sequence omitted]

SEQ ID NO: 795 - protein, 106 aa, Artificial Sequence [sequence omitted]

SEQ ID NO: 796 - protein, 116 aa, Artificial Sequence
  Heavy Chain Sequence
QVQLVQSGAEVKKPGASVKVSCKASGYAFTYYLIEWVRQAPGQGLEWIGVINPGSGGTNYNEKFKGRATITADKSTSTAYMELSSLRSEDTAVYFCARNWMNFDYWGQGTTVTVSS

SEQ ID NO: 797 - protein, 112 aa, Artificial Sequence
  Light Chain Sequence
DIVMTQTPLSLSVTPGQPASISCRSSKSLLHSNGNTYLYWFLQKPGQSPQFLIYRMSNLASGVPDRFSGSGSGTDFTLKISRVEAEDVGVYYCMQHLEYPYTFGGGTKVEIK

SEQ ID NO: 798 - protein, 120 aa, Artificial Sequence
  Heavy Chain Sequence
QVQLVQSGAEVKKPGSSVKVSCKASGGTFSSYAISWVRQAPGQGLEWMGLIIPMFDTAGYAQKFQGRVAITVDESTSTAYMELSSLRSEDTAVYYCARAEHSSTGTFDYWGQGTLVTVSS

SEQ ID NO: 799 - protein, 107 aa, Artificial Sequence
  Light Chain Sequence
DIQMTQSPSSVSASVGDRVTITCRASQGISSWLAWYQQKPGKAPKLLISAASSLQSGVPSRFSGSGSGTDFTLTISSLQPEDFATYYCQQANHLPFTFGGGTKVEIK

SEQ ID NO: 800 - protein, 120 aa, Artificial Sequence
  Heavy Chain Sequence
QVQLVESGGGVVQPGRSLRLSCAASGFTFSSYGMHWVRQAPGKGLEWVAVIWYDGSNQYYADSVKGRFTISRDNSKNTLFLQMHSLRAEDTAVYYCARGLTSGRYGMDVWGQGTTVTVSS

SEQ ID NO: 801 - protein, 112 aa, Artificial Sequence
  Light Chain Sequence
DIVMTQSPLSLPVTPGEPASISCRSSQSLLLSHGFNYLDWYLQKPGQSPQLLIYLGSSRASGVPDRFSGSGSGTDFTLKISRVEAEDVGLYYCMQPLQIPWTFGQGTKVEIK

SEQ ID NO: 802 - protein, 119 aa, Artificial Sequence
  Heavy Chain Sequence
EVQLVESGGGLVQPGGSLRLSCAASGFTFSPFAMSWVRQAPGKGLEWVAKISPGGSWTYYSDTVTGRFTISRDNAKNSLYLQMNSLRAEDTAVYYCARQLWGYYALDIWGQGTTVTVSS

SEQ ID NO: 803 - protein, 106 aa, Artificial Sequence
  Light Chain Sequence
EIVLTQSPATLSLSPGERATLSCSASISVSYMYWYQQKPGQAPRLLIYDMSNLASGIPARFSGSGSGTDFTLTISSLEPEDFAVYYCMQWSGYPYTFGGGTKVEIK

SEQ ID NO: 804 - protein, 116 aa, Artificial Sequence
  Heavy Chain Sequence
EVQLVESGGGLVQPGGSLRLSCAASGYSITNDYAWNWVRQAPGKGLEWVGYISYSGYTTYNPSLKSRFTISRDTSKNTLYLQMNSLRAEDTAVYYCARWTSGLDYWGQGTLVTVSS

SEQ ID NO: 805 - protein, 107 aa, Artificial Sequence
  Light Chain Sequence
DIQMTQSPSSLSASVGDRVTITCKASDLIHNWLAWYQQKPGKAPKLLIYGATSLETGVPSRFSGSGSGTDFTLTISSLQPEDFATYYCQQYWTTPFTFGQGTKVEIK

SEQ ID NO: 806 - protein, 112 aa, Artificial Sequence
  Heavy Chain Sequence
EVQLVESGGGLVQPGGSLRLSCAASGFTFSRYSMSWVRQAPGKGLELVAQINSVGNSTYYPDTVKGRFTISRDNAKNTLYLQMNSLRAEDTAVYYCASGDYWGQGTLVTVSS

SEQ ID NO: 807 - protein, 112 aa, Artificial Sequence
  Light Chain Sequence
DVVMTQSPLSLPVTLGQPASISCRSSQSLIYSDGNAYLHWFLQKPGQSPRLLIYKVSNRFSGVPDRFSGSGSGTDFTLKISRVEAEDVGVYYCSQSTHVPWTFGQGTKVEIK

SEQ ID NO: 808 - protein, 120 aa, Artificial Sequence
  Heavy Chain Sequence
EVQLLEQSGAELVRPGTSVKISCKASGYAFTNYWLGWVKQRPGHGLEWIGDIFPGSGNIHYNEKFKGKATLTADKSSSTAYMQLSSLTFEDSAVYFCARLRNWDEPMDYWGQGTTVTVSS

SEQ ID NO: 809 - protein, 113 aa, Artificial Sequence
  Light Chain Sequence
ELVMTQSPSSLTVTAGEKVTMSCKSSQSLLNSGNQKNYLTWYQQKPGQPPKLLIYWASTRESGVPDRFTGSGSGTDFTLTISSVQAEDLAVYYCQNDYSYPLTFGAGTKLEIK

SEQ ID NO: 810 - protein, 119 aa, Artificial Sequence
  Heavy Chain Sequence (if bispec)
DVQLVQSGAEVKKPGASVKVSCKASGYTFTRYTMHWVRQAPGQGLEWIGYINPSRGYTNYADSVKGRFTITTDKSTSTAYMELSSLRSEDTATYYCARYYDDHYCLDYWGQGTTVTVSS

SEQ ID NO: 811 - protein, 106 aa, Artificial Sequence
  Light Chain Sequence (if bispec)
DIVLTQSPATLSLSPGERATLSCRASQSVSYMNWYQQKPGKAPKRWIYDTSKVASGVPARFSGSGSGTDYSLTINSLEAEDAATYYCQQWSSNPLTFGGGTKVEIK

SEQ ID NO: 812 - protein, 117 aa, Artificial Sequence
  Heavy Chain Sequence
EVQLVQSGAEVKKPGESLRISCKGSGYTFTTYWMHWVRQATGQGLEWMGNIYPGTGGSNFDEKFKNRVTITADKSTSTAYMELSSLRSEDTAVYYCTRWTTGTGAYWGQGTTVTVSS

SEQ ID NO: 813 - protein, 113 aa, Artificial Sequence
  Light Chain Sequence
EIVLTQSPATLSLSPGERATLSCKSSQSLLDSGNQKNFLTWYQQKPGQAPRLLIYWASTRESGVPSRFSGSGSGTDFTFTISSLEAEDAATYYCQNDYSYPYTFGQGTKVEIK

SEQ ID NO: 814 - protein, 119 aa, Artificial Sequence [sequence omitted]

SEQ ID NO: 815 - protein, 108 aa, Artificial Sequence [sequence omitted]

SEQ ID NO: 816 - protein, 123 aa, Artificial Sequence
  Heavy Chain Sequence
EVQLVESGGDLVQPGRSLRLSCVASGFTFDDYAMHWVRQAPGKGLEWVSGVSWSGSTVGYADSVKGRFTVSRDNAQKSLYLQMNSLRAEDTALYYCVKDAYKFNYYYYGLDVWGQGTTVTVSS

SEQ ID NO: 817 - protein, 107 aa, Artificial Sequence
  Light Chain Sequence
EIVMTQSPATLSVSPGERATLSCRASQTILSNLAWYLQKPGQAPRLLIYGASTRATGLPARFSGSGSGTEFTLTISSLQSEDFAVYYCQQYNNWPLTFGGGTKVEIK

SEQ ID NO: 818 - protein, 118 aa, Artificial Sequence
  Heavy Chain Sequence
EVQLVESGGGLVKPGGSLRLSCAASGFTFSNYAMSWVRQAPGKGLEWVATISSGGSHTYYLDSVKGRFTISRDNSKNTLYLQMNSLRAEDTALYYCARLFTGYAMDYWGQGTLVTVSS

SEQ ID NO: 819 - protein, 109 aa, Artificial Sequence
  Light Chain Sequence
QIVLTQSPATLSLSPGERATMSCTASSSVSSSYLHWYQQKPGKAPKLWIYSTSNLASGVPSRFSGSGSGTDYTLTISSLQPEDFATYYCHQYYRLPPITFGQGTKLEIK

SEQ ID NO: 820 - protein, 118 aa, Artificial Sequence
  Heavy Chain Sequence
QVQLVQSGAEVKKPGASVKVSCKASGYTFTNSWIGWFRQAPGQGLEWIGDIYPGGGYTNYNEIFKGKATMTADTSTNTAYMELSSLRSEDTAVYYCSRGIPGYAMDYWGQGTLVTVSS

SEQ ID NO: 821 - protein, 113 aa, Artificial Sequence
  Light Chain Sequence
DIQMTQRPDSLSASVGDRVTMSCKSSQSLLNSGDQKNYLTWYQQKPGQPPKLLIYWASTGESGVPDRFSGSGSGTDFTFTISSLQPEDIATYYCQNDYSYPWTFGQGTKVEIK

SEQ ID NO: 822 - protein, 122 aa, Artificial Sequence
  Heavy Chain Sequence
EVQLVESGGGLVQPGGSLRLSCAASGFTFSSHDMHWVRQATGKGLEWVSGIGTAGDTYYPDSVKGRFTISRENAKNSLYLQMNSLRAGDTAVYYCARDRYSPTGHYYGMDVWGQGTTVTVSS

SEQ ID NO: 823 - protein, 106 aa, Artificial Sequence
  Light Chain Sequence
DIQMTQSPSTLSASVGDRVTITCRASQSISSWLAWYQQKPGKAPKLLIYKASSLESGVPSRFSGSGSGTEFTLTISSLQPDDFATYYCKQYADYWTFGQGTKVEIK

SEQ ID NO: 824 - protein, 123 aa, Artificial Sequence [sequence omitted]

SEQ ID NO: 825 - protein, 107 aa, Artificial Sequence [sequence omitted]

SEQ ID NO: 826 - protein, 118 aa, Artificial Sequence
  Heavy Chain Sequence
EVQLQQSGAELVKPGASVKLSCTASGFNINDTYMHWVKQRPEQGLEWIGRIDPANGNTKYDPKFQGKATITADTSSNTAYLQLSSLTSEDTAVYYCARGARGSRFAYWGQGTLVTVSA

SEQ ID NO: 827 - protein, 107 aa, Artificial Sequence
  Light Chain Sequence
DIQMTQSPASLSVSVGETVTITCRASENIYSNLAWYQQKQGKSPQLLVYVATNLADGVPSRFSGSGSGTQYSLKINSLQSEDFGSYYCQHFWGTPYTFGGGTKLEIK

SEQ ID NO: 828 - protein, 119 aa, Artificial Sequence
  Heavy Chain Sequence
QVQLVQSGAEVKKPGSSVKVSCKASGYAFTNYLIEWVRQAPGQGLEWIGVIYPGSGGTNYNEKFKGRVTLTVDESTNTAYMELSSLRSEDTAVYFCARRDGNYGWFAYWGQGTLVTVSS

SEQ ID NO: 829 - protein, 107 aa, Artificial Sequence
  Light Chain Sequence
DIQMTQTPSTLSASVGDRVTISCRASQDINNYLNWYQQKPGKAPKLLIYYTSTLHSGVPSRFSGSGSGTDYTLTISSLQPDDFATYFCQQGNTLPWTFGQGTKVEVK

SEQ ID NO: 830 - protein, 121 aa, Artificial Sequence; identical to SEQ ID NO: 593
  Heavy Chain Sequence

SEQ ID NO: 831 - protein, 112 aa, Artificial Sequence; identical to SEQ ID NO: 594
  Light Chain Sequence

SEQ ID NO: 832 - protein, 120 aa, Artificial Sequence [sequence omitted]

SEQ ID NO: 833 - protein, 113 aa, Artificial Sequence [sequence omitted]

SEQ ID NO: 834 - protein, 123 aa, Artificial Sequence
  Heavy Chain Sequence
QVQLVQSGAEVKKPGSSVKVSCKASGGTFSSYWIEWVRQAPGQGLEWMGEILPGSGNTYYNERFKDRVTITADESTSTAYMELSSLRSEDTAVYYCARRAAAYYSNPEWFAYWGQGTLVTVSS

SEQ ID NO: 835 - protein, 108 aa, Artificial Sequence
  Light Chain Sequence
EIVLTQSPATLSLSPGERATLSCTASSSVNSFYLHWYQQKPGLAPRLLIYSTSNLASGIPDRFSGSGSGTDFTLTISRLEPEDFAVYYCHQYHRSPYTFGQGTKLEIK

SEQ ID NO: 836 - protein, 121 aa, Artificial Sequence
  Heavy Chain Sequence
EVKLLESGGGLVQPGGSMRLSCAGSGFTFTDFYMNWIRQPAGKAPEWLGFIRDKAKGYTTEYNPSVKGRFTISRDNTQNMLYLQMNTLRAEDTATYYCAREGHTAAPFDYWGQGTLVTVSS

SEQ ID NO: 837 - protein, 107 aa, Artificial Sequence
  Light Chain Sequence
DIKMTQSPSFLSASVGDRVTLNCKASQNIDKYLNWYQQKLGESPKLLIYNTNNLQTGIPSRFSGSGSGTDFTLTISSLQPEDVATYFCLQHISRPRTFGGGTHLTVL

SEQ ID NO: 838 - protein, 121 aa, Artificial Sequence [sequence omitted]

SEQ ID NO: 839 - protein, 107 aa, Artificial Sequence [sequence omitted]

SEQ ID NO: 840 - protein, 115 aa, Artificial Sequence
  Heavy Chain Sequence
EVQLVESGGGLVQPGGSLRLSCAASGFTFSSSGMSWVRQAPGKGLEWVSVIASSGSNTYYADSVKGRFTISRDNSKNTLYLQMNSLRAEDTAVYYCARSIFYTTWGQGTLVTVSS

SEQ ID NO: 841 - protein, 108 aa, Artificial Sequence
  Light Chain Sequence
DIVLTQSPATLSLSPGERATLSCRASQSVRSNYLAWYQQKPGQAPRLLIYGASSRATGVPARFSGSGSGTDFTLTISSLEPEDFAVYYCQQYSNFPITFGQGTKVEIK

SEQ ID NO: 842 - protein, 121 aa, Artificial Sequence
  Heavy Chain Sequence
QVQLQESGPGLVKPSQTLSLTCAVYGGSFSSGYWNWIRKHPGKGLEYIGYISYNGITYHNPSLKSRITINRDTSKNQYSLQLNSVTPEDTAVYYCARYKYDYDGGHAMDYWGQGTLVTVSS

SEQ ID NO: 843 - protein, 107 aa, Artificial Sequence
  Light Chain Sequence
DIQMTQSPSSLSASVGDRVTITCRASQDISNYLNWYQQKPGKAPKLLIYYTSKLHSGVPSRFSGSGSGTDYTLTISSLQPEDFATYYCQQGSALPWTFGQGTKVEIK

SEQ ID NO: 844 - protein, 122 aa, Artificial Sequence [sequence omitted]

SEQ ID NO: 845 - protein, 107 aa, Artificial Sequence
  Light Chain Sequence
AIQMTQSPSSLSASVGDRVTITCRASQDIRNYLNWYQQKPGKAPKLLIYYTSRLESGVPSRFSGSGSGTDYTLTISSLQPEDFATYYCQQGNTLPWTFGQGTKVEIK

SEQ ID NO: 846 - protein, 121 aa, Artificial Sequence
  Heavy Chain Sequence
QLQLQESGPGLVKPSETLSLTCTVSGGSISSGSYFWGWIRQPPGKGLEWIGSIYYSGITYYNPSLKSRVTISVDTSKNQFSLKLSSVTAADTAVYYCARHDGAVAGLFDYWGQGTLVTVSS

SEQ ID NO: 847 - protein, 108 aa, Artificial Sequence
  Light Chain Sequence
SYVLTQPPSVSVAPGQTARITCGGNNIGSKSVHWYQQPPGQAPVVVVYDDSDRPSGIPERFSGSNSGNTATLTISRVEAGDEAVYYCQVWDSSSDHVVFGGGTKLTVL

SEQ ID NO: 848 - protein, 125 aa, Artificial Sequence
  Heavy Chain Sequence (if bispec)
EVQLVESGGGLVQPGGSLRLSCAASGFTFNTYAMNWVRQAPGKGLEWVARIRSKYNNYATYYAASVKGRFTISRDDSKNSLYLQMNSLKTEDTAVYYCARHGNFGNSYVSWFAYWGQGTLVTVSS

SEQ ID NO: 849 - protein, 109 aa, Artificial Sequence
  Light Chain Sequence (if bispec)
QTVVTQEPSLTVSPGGTVTLTCRSSTGAVTTSNYANWVQQKPGQAPRGLIGGTNKRAPGTPARFSGSLLGGKAALTLSGVQPEDEAEYYCALWYSNLWVFGGGTKLTVL

SEQ ID NO: 850 - protein, 118 aa, Artificial Sequence
  Heavy Chain Sequence
QVQLVQSGAEVKKPGASVKVSCKASGYIFTAYTMHWVRQAPGQGLEWMGWIKPNNGLANYAQKFQGRVTMTRDTSISTAYMELSRLRSDDTAVYYCARSEITTEFDYWGQGTLVTVSS

SEQ ID NO: 851 - protein, 111 aa, Artificial Sequence
  Light Chain Sequence
DIVMTQSPDSLAVSLGERATINCKSSESVDSYANSFLHWYQQKPGQPPKLLIYRASTRESGVPDRFSGSGSGTDFTLTISSLQAEDVAVYYCQQSKEDPLTFGGGTKVEIK

SEQ ID NO: 852 - protein, 116 aa, Artificial Sequence
  Heavy Chain Sequence
QVQLVQSGAEVKKPGSSVKVSCKASGYTFTDYEMHWVRQAPGQGLEWIGAVAPETGGTAYNQKFKGRATITADKSTSTAYMELSSLRSEDTAVYYCTSTVVPFAYWGQGTLVTVSS

SEQ ID NO: 853 - protein, 106 aa, Artificial Sequence
  Light Chain Sequence
QIQLTQSPSSLSASVGDRVTITCSASSSVSYMYWYQQKPGKAPKAWIYRTSNLASGVPSRFSGSGSGTDYTLTISSLQPEDFATYYCQQYQSLPLTFGGGTKVEIK

SEQ ID NO: 854 - protein, 120 aa, Artificial Sequence
  Heavy Chain Sequence
EIQLQQSGPELVKPGASVKVSCKASGYAFTSYNMYWVKQSHGKSLEWIGYIDPYNGVTSYNQKFKGKATLTVDKSSSTAYMHLNSLTSEDSAVYYCARGGGSIYYAMDYWGQGTSVTVSS

SEQ ID NO: 855 - protein, 112 aa, Artificial Sequence
  Light Chain Sequence
DIVMTQAAPSVPVTPGESVSISCRSSKSLLHSNGNTYLYWFLQRPGQSPQLLIYRMSNLASGVPDRFSGSGSGTAFTLRISRVEAEDVGVYYCMQHLEYPLTFGAGTKLELK

SEQ ID NO: 856 - protein, 119 aa, Artificial Sequence [sequence omitted]

SEQ ID NO: 857 - protein, 106 aa, Artificial Sequence [sequence omitted]

SEQ ID NO: 858 - protein, 118 aa, Artificial Sequence
  Heavy Chain Sequence
QVQLVQSGAEVKKPGASVKVSCKASGYTFTSYYMHWVRQAPGQGLEWMGIINPSGGSTSYAQKFQGRVTMTRDTSTSTVYMELSSLRSEDTAVYYCAKGTTGDWFDYWGQGTLVTVSS

SEQ ID NO: 859 - protein, 107 aa, Artificial Sequence
  Light Chain Sequence
DIQMTQSPSSLSASVGDRVTITCRASQSISSYLNWYQQKPGKAPKLLIYAASSLQSGVPSRFSGSGSGTDFTLTISSLQPEDFATYYCQQSYSTPPTFGQGTKVEIK

SEQ ID NO: 860 - protein, 118 aa, Artificial Sequence
  Heavy Chain Sequence (if bispec)
QVQLVQSGGGVVQPGRSLRLSCVASGFTFSSYGMHWVRQAPGKGLEWVAAIWYNARKQDYADSVKGRFTISRDNSKNTLYLQMNSLRAEDTAVYYCTRGTGYNWFDPWGQGTLVTVSS

SEQ ID NO: 861 - protein, 107 aa, Artificial Sequence; identical to SEQ ID NO: 859
  Light Chain Sequence (if bispec)

SEQ ID NO: 862 - protein, 118 aa, Artificial Sequence
  Heavy Chain Sequence
QVELVESGGGVVQPGRSQRLSCAASGFTFSSYGMHWVRQAPGKGLEWVAIIWFDGSSTYYADSVRGRFTISRDNSKNTLYLQMNSLRAEDTAVYFCARELGRRYFDLWGRGTLVSVSS

SEQ ID NO: 863 - protein, 108 aa, Artificial Sequence
  Light Chain Sequence
EIVLTQSPATLSLSPGERATLSCRASQSVSSYLAWYQQKPGQAPRLLIYDASKRATGIPARFSGSGSGTDFTLTISSLEPEDFAVYYCQQRSKWPPWTFGQGTKVESK

SEQ ID NO: 864 - protein, 116 aa, Artificial Sequence
  Heavy Chain Sequence
EVQLVQSGAEVKKPGSSVKVSCKASGGTFSSYAISWVRQAPGQGLEWMGGIGPFFGTANYAQKFQGRVTITADESTSTAYMELSSLRSEDTAVYYCARDTPYFDYWGQGTLVTVSS

SEQ ID NO: 865 - protein, 108 aa, Artificial Sequence
  Light Chain Sequence
SYELTQPLSVSVALGQTARITCSGDSIPNYYVYWYQQKPGQAPVLVIYDDSNRPSGIPERFSGSNSGNTATLTISRAQAGDEADYYCQSFDSSLNAEVFGGGTKLTVL

SEQ ID NO: 866 - protein, 122 aa, Artificial Sequence
  Heavy Chain Sequence
QMQLVESGGGVVQPGRSLRLSCAASGFTFRTYGMHWVRQAPGKGLEWVAVIWYDGSNKHYADSVKGRFTITRDNSKNTLNLQMNSLRAEDTAVYYCARAPQWELVHEAFDIWGQGTMVTVSS

SEQ ID NO: 867 - protein, 108 aa, Artificial Sequence
  Light Chain Sequence
SYVLTQPPSVSVAPGQTARITCGGNNLGSKSVHWYQQKPGQAPVLVVYDDSDRPSWIPERFSGSNSGNTATLTISRGEAGDEADYYCQVWDSSSDHVVFGGGTKLTVL

SEQ ID NO: 868 - protein, 123 aa, Artificial Sequence [sequence omitted]

SEQ ID NO: 869 - protein, 107 aa, Artificial Sequence [sequence omitted]

SEQ ID NO: 870 - protein, 119 aa, Artificial Sequence
  Heavy Chain Sequence (if bispec)
QVQLVQSGAEVKKPGSSVKVSCKASGYKFTDYHIHWVRQAPGQCLEWMGVINPTYGTTDYNQRFKGRVTITADESTSTAYMELSSLRSEDTAVYYCARYDYFTGTGVYWGQGTLVTVSS

SEQ ID NO: 871 - protein, 112 aa, Artificial Sequence
  Light Chain Sequence (if bispec)
DIVMTQTPLSLSVTPGQPASISCRSSRSLVHSRGETYLHWYLQKPGQSPQLLIYKVSNRFIGVPDRFSGSGSGTDFTLKISRVEAEDVGVYYCSQSTHLPFTFGCGTKLEIK

SEQ ID NO: 872 - protein, 122 aa, Artificial Sequence
  Heavy Chain Sequence
EVQLVESGGGLVQPGGSLRLSCAASGFTFSDYGMAWFRQAPGKGLEWVSFISNLGYSIYYADSVKGRFTISRDNAKNSLYLQMNSLRAEDTAVYYCARAPYDYDSFDPMDYWGQGTLVTVSS

SEQ ID NO: 873 - protein, 112 aa, Artificial Sequence
  Light Chain Sequence
DIVMTQSPDSLAVSLGERATINCKSSQSLLNSRNRKNYLAWYQQKPDQSPKLLIYWASTRESGVPDRFSGSGSGTDFTLTISSLQAEDVAVYYCKQSYYLWTFGGGTKVEIK

SEQ ID NO: 874 - protein, 125 aa, Artificial Sequence; identical to SEQ ID NO: 684
  Heavy Chain Sequence (if bispec)

SEQ ID NO: 875 - protein, 109 aa, Artificial Sequence
  Light Chain Sequence (if bispec)
QAVVTQEPSLTVSPGGTVTLTCGSSTGAVTTSNYANWVQQKPGKSPRGLIGGTNKRAPGVPARFSGSLLGGKAALTISGAQPEDEADYYCALWYSNHWVFGGGTKLTVL

SEQ ID NO: 876 - protein, 119 aa, Artificial Sequence [sequence omitted]

SEQ ID NO: 877 - protein, 106 aa, Artificial Sequence [sequence omitted]

SEQ ID NO: 878 - protein, 115 aa, Artificial Sequence
  Heavy Chain Sequence
EVKVVESGGGLVQPGGSMKLSCVVSGFTFSNYWVNWVRQAPGKGLEWVAQIRLKSDNYATHYEESVKGRFTISRDDSKSSVYLQMNNLRAEDSGIYYCTNWEDYWGQGTTVTVSS

SEQ ID NO: 879 - protein, 110 aa, Artificial Sequence
  Light Chain Sequence
DIVLTQSPDSLAVSLGERATISCRASQSVSTSRYSYIHWYQQKPGQPPKLLIKYASNLESGVPSRFGSGSGTDFTLNIHPLEPEDFATYYCHHSWEIPLTFGQGTKLEIK

SEQ ID NO: 880 - protein, 116 aa, Artificial Sequence [sequence omitted]

SEQ ID NO: 881 - protein, 107 aa, Artificial Sequence [sequence omitted]

SEQ ID NO: 882 - protein, 117 aa, Artificial Sequence
  Heavy Chain Sequence
QVQLVESGGGVVQPGRSLRLSCAASGFTFFSYAMHWVRQTPGKGLEWVAVIWFDGSNENYVDSVKGRFTISRDNSKNTLYLQMNTLRAEDTAVYYCARDAWSYFDYWGQGTLVTVSS

SEQ ID NO: 883 - protein, 107 aa, Artificial Sequence
  Light Chain Sequence
VIQLTQSPSSLSASVGDRVTITCRASQGISRALAWYQQKPGKGPKLLIYDASSLESGVPSRFSGSGSGTDFTLTISSLQPEDFATYYCQQFNSYPLTFGGGTKVEIK

SEQ ID NO: 884 - protein, 126 aa, Artificial Sequence
  Heavy Chain Sequence
EVQLQQSGPGLVKPSQTLSLTCAISGDSVSSNSAAWNWIRQSPSRGLEWLGKTYYRFKWYSDYAVSVKGRITINPDTSKNQFSLQLNSVTPEDTAVFYCTRESTTYDLLAGPFDYWGQGTLVTVSS

SEQ ID NO: 885 - protein, 113 aa, Artificial Sequence
  Light Chain Sequence
DIVMTQSPDSLAVSLGERATINCKSSQTVLYSSNNKKYLAWYQQKPGQPPNLLIYWASTRESGVPDRFSGSGSGTDFTLTISSLQAEDVAVYYCQQYYSTPFTFGPGTKVEIK

SEQ ID NO: 886 - protein, 118 aa, Artificial Sequence
  Heavy Chain Sequence
QVQLQESGPGLVKPSETLSLTCTVSGFSLTSYGVHWIRQPPGKGLEWIGVIYADGSTNYNPSLKSRVTISKDTSKNQVSLKLSSVTAADTAVYYCARAYGNYWYIDVWGQGTTVTVSS

SEQ ID NO: 887 - protein, 107 aa, Artificial Sequence
  Light Chain Sequence
DIVMTQSPDSLAVSLGERATINCKSSESVSNDVAWYQQKPGQPPKLLINYAFHRFTGVPDRFSGSGYGTDFTLTISSLQAEDVAVYYCHQAYSSPYTFGQGTKLEIK

SEQ ID NO: 888 - protein, 118 aa, Artificial Sequence
  Heavy Chain Sequence
EVQLLESGGGLVQPGGSLRLSCAASGFTFSNYAMSWVRQAPGKGLEWVSSISGSGDYTYYTDSVKGRFTISRDNSKNTLYLQMNSLRAEDTAVYYCARSPWGYYLDSWGQGTLVTVSS

SEQ ID NO: 889 - protein, 107 aa, Artificial Sequence
  Light Chain Sequence
DIQMTQSPPSLSASAGDRVTITCRASQGISSRLAWYQQKPEKAPKSLIYAASSLQSGVPSRFSGSGSGTDFTLTISSLQPEDFATYYCQQYNSYPYTFGQGTKLEIK

SEQ ID NO: 890 - protein, 119 aa, Artificial Sequence [sequence omitted]

SEQ ID NO: 891 - protein, 107 aa, Artificial Sequence [sequence omitted]

SEQ ID NO: 892 - protein, 118 aa, Artificial Sequence
  Heavy Chain Sequence
EVQLVQSGSELKKPGASVKLSCKASGFTFTTYGINWVRQAPGQGLEWIGWIYPRDGSTNFNENFKDRATITVDTSASTAYMELSSLRSEDTAVYFCARLTGGTFLDYWGQGTTVTVSS

SEQ ID NO: 893 - protein, 111 aa, Artificial Sequence
  Light Chain Sequence
DIVLTQSPATLSLSPGERATLSCRASESVEYYGTSLMQWYQQKPGQPPKLLIFGASNVESGVPDRFSGSGSGTDFTLKISRVEAEDVGMYFCQQSRKLPWTFGGGTKVEIK

SEQ ID NO: 894 - protein, 119 aa, Artificial Sequence
  Heavy Chain Sequence
QVQLKQSGPGLVQPSQSLSITCTVSGFSLTNYGVHWVRQSPGKGLEWLGVIWSGGNTDYNTPFTSRLSINKDNSKSQVFFKMNSLQSNDTAIYYCARALTYYDYEFAYWGQGTLVTVST

SEQ ID NO: 895 - protein, 107 aa, Artificial Sequence; identical to SEQ ID NO: 163
  Light Chain Sequence

SEQ ID NO: 896 - protein, 125 aa, Artificial Sequence [sequence omitted]

SEQ ID NO: 897 - protein, 112 aa, Artificial Sequence [sequence omitted]

SEQ ID NO: 898 - protein, 121 aa, Artificial Sequence
  Heavy Chain Sequence
EVQMVQSGAEVKKPGEPLKISCKGSGYKFGTHWIGWVRQRPGKGLEWMGIIHPADSETKYSPSFQGQVSFSADKSSNTAYLHWSTLRASDTAMYYCARRSGSSSWYALDFWGQGTMVTVSS

SEQ ID NO: 899 - protein, 111 aa, Artificial Sequence
  Light Chain Sequence
QSVLTQSPSASGTPGQRVTISCSGGSSNIGSNTVNWYQQFPGAAPKLLIYTNNQRPSGVPDRFSGSKSGTSASLAISGLQSEDEADYYCATWDDSLNGLYVFGTGTKVTVL

SEQ ID NO: 900 - protein, 120 aa, Artificial Sequence
  Heavy Chain Sequence
QVQLVESGGGLVKPGGSLRLSCAASGFTFSDYYMNWIRQAPGKGLEWVSYISSSGSIIYYADSVKGRFTISRDNAKNSLYLQMNSLRAEDTAVYYCAREGRIAARGMDVWGQGTTVTVSS

SEQ ID NO: 901 - protein, 108 aa, Artificial Sequence
  Light Chain Sequence
DIQMTQSPSSLSASVGDRVSITCRPSQSFSRYINWYQQKPGKAPKLLIHAASSLVGGVPSRFSGSGSGTDFTLTISSLQPEDFATYYCQQTYSNPPITFGQGTRLEMK

SEQ ID NO: 902 - protein, 122 aa, Artificial Sequence
  Heavy Chain Sequence
QVQLVQSGAEVKKPGASVKVSCKASGYTFTNYGLSWVRQAPGQGLEWMGWISANNGDTNYGQEFQGRVTMTTDTSTSTAYMELRSLRSDDTAVYYCARDSSSSWARWFFDLWGRGTLVTVSS

SEQ ID NO: 903 - protein, 108 aa, Artificial Sequence
  Light Chain Sequence
SYVLTQPPSVSVAPGKTARITCGGNIIGSKLVHWYQQKPGQAPVLVIYDDGDRPSGIPERFSGSNSGNTATLTISRVEAGDEADYYCQVWDTGSDPVVFGGGTKLTVL

SEQ ID NO: 904 - protein, 120 aa, Artificial Sequence [sequence omitted]

SEQ ID NO: 905 - protein, 107 aa, Artificial Sequence [sequence omitted]

SEQ ID NO: 906 - protein, 124 aa, Artificial Sequence
  Heavy Chain Sequence
EEQLVESGGGLVKPGGSLRLSCAASGFSFSDCRMYWLRQAPGKGLEWIGVISVKSENYGANYAESVRGRFTISRDDSKNTVYLQMNSLKTEDTAVYYCSASYYRYDVGAWFAYWGQGTLVTVSS

SEQ ID NO: 907 - protein, 111 aa, Artificial Sequence
  Light Chain Sequence
DIVMTQSPDSLAVSLGERATINCRASKSVSTSGYSYIYWYQQKPGQPPKLLIYLASILESGVPDRFSGSGSGTDFTLTISSLQAEDVAVYYCQHSRELPWTFGQGTKVEIK

SEQ ID NO: 908 - protein, 125 aa, Artificial Sequence
  Heavy Chain Sequence
QVQLVESGGGVVQPGRSLRLSCAASGFTFSSYGMHWVRQAPGKGLEWVAVIWYDGSNKYYADSVKGRFTISRDNSKNTLYLQMNSLRAEDTAVYYCARDPRGATLYYYYYGMDVWGQGTTVTVSS

SEQ ID NO: 909 - protein, 107 aa, Artificial Sequence
  Light Chain Sequence
DIQMTQSPSSLSASVGDRVTITCRASQSINSYLDWYQQKPGKAPKLLIYAASSLQSGVPSRFSGSGSGTDFTLTISSLQPEDFATYYCQQYYSTPFTFGPGTKVEIK

SEQ ID NO: 910 - protein, 120 aa, Artificial Sequence
  Heavy Chain Sequence
EVQVLESGGDLVQPGGSLRLSCAASGFTFSAYAMTWVRQAPGKGLEWVSAISGSGGSAYYADSVKGRFTISRDNSKNTVYLQMNSLRAEDTAVYYCAKDGAWKMSGLDVWGQGTTVIVSS

SEQ ID NO: 911 - protein, 107 aa, Artificial Sequence
  Light Chain Sequence
DIQMTQSPASLSASVGDRVTITCRASQDISDYLAWYQQKPGKIPRLLIYTTSTLQSGVPSRFRGSGSGTDFTLTISSLQPEDVATYYCQKYDSAPLTFGGGTKVEIK

SEQ ID NO: 912 - protein, 118 aa, Artificial Sequence
  Heavy Chain Sequence
QAYLQQSGAELVRPGASVKMSCKASGYTFTSYNMHWVKQTPRQGLEWIGGIYPGNGDTSYNQKFKGKATLTVGKSSSTAYMQLSSLTSEDSAVYFCARYDYNYAMDYWGQGTSVTVSS

SEQ ID NO: 913 - protein, 106 aa, Artificial Sequence
  Light Chain Sequence
QIVLSQSPAILSASPGEKVTMTCRASSSVSYMHWYQQKPGSSPKPWIYATSNLASGVPARFSGSGSGTSYSFTISRVEAEDAATYYCQQWTFNPPTFGGGTRLEIK

SEQ ID NO: 914 - protein, 125 aa, Artificial Sequence
  Heavy Chain Sequence
EVQLVESGGGLVQPGGSLRLSCAAAGFTFSSYSMNWVRQAPGKGLEWVSYISSRSRTIYYADSVKGRFTISRDNAKNSLYLQMNSLRDEDTAVYYCARDYGGQPPYYYYYGMDVWGQGTTVTVSS

SEQ ID NO: 915 - protein, 107 aa, Artificial Sequence
  Light Chain Sequence
DIQMTQSPSSLSASVGDRVTITCRASQGISSWLAWYQQKPEKAPKSLIYAASSLQSGVPSRFSGSGSGTDFTLTISSLQPEDFVTYYCQQYNSYPRTFGQGTKVEIK

SEQ ID NO: 916 - protein, 121 aa, Artificial Sequence [sequence omitted]

SEQ ID NO: 917 - protein, 109 aa, Artificial Sequence [sequence omitted]

SEQ ID NO: 918 - protein, 119 aa, Artificial Sequence
  Heavy Chain Sequence
EVQLVQSGAEVKKPGESLKISCKGSGYSFTTYWLGWVRQMPGKGLDWIGIMSPVDSDIRYSPSFQGQVTMSVDKSITTAYLQWNSLKASDTAMYYCARRRPGQGYFDFWGQGTLVTVSS

SEQ ID NO: 919 - protein, 107 aa, Artificial Sequence
  Light Chain Sequence
DIQMTQSPSSLSASVGDRVTITCRASQGISSWLAWYQQKPEKAPKSLIYAASSLQSGVPSRFSGSGSGTDFTLTISSLQPEDFATYYCQQYNIYPYTFGQGTKLEIK

SEQ ID NO: 920 - protein, 116 aa, Artificial Sequence
  Heavy Chain Sequence
EVQLVQSGAEVKKPGESLRISCKGSGYSFSTYWISWVRQMPGKGLEWMGKIYPGDSYTNYSPSFQGQVTISADKSISTAYLQWSSLKASDTAMYYCARGYGIFDYWGQGTLVTVSS

SEQ ID NO: 921 - protein, 108 aa, Artificial Sequence
  Light Chain Sequence
SYELTQPPSVSVSPGQTASITCSGDNIGDQYAHWYQQKPGQSPVLVIYQDKNRPSGIPERFSGSNSGNTATLTISGTQAMDEADYYCATYTGFGSLAVFGGGTKLTVL

SEQ ID NO: 922 - protein, 117 aa, Artificial Sequence
  Heavy Chain Sequence
QVQLVQSGAEVKKPGASVKVSCKASGYTFTNYDINWVRQAPGQGLEWIGWIYPGDGSTKYNEKFKAKATLTADTSTSTAYMELRSLRSDDTAVYYCASGYEDAMDYWGQGTTVTVSS

SEQ ID NO: 923 - protein, 107 aa, Artificial Sequence
  Light Chain Sequence
DIQMTQSPSSLSASVGDRVTINCKASQDINSYLSWFQQKPGKAPKTLIYRANRLVDGVPSRFSGSGSGQDYTLTISSLQPEDFATYYCLQYDEFPLTFGGGTKVEIK

SEQ ID NO: 924 - protein, 113 aa, Artificial Sequence
  Heavy Chain Sequence
QVQLQQSGPELVKPGALVKISCKASGYTFTNYDIHWVKQRPGQGLEWIGWIYPGDGSTKYNEKFKGKATLTADKSSSTAYMHLSSLTSEKSAVYFCAREWAYWGQGTLVTVSA

SEQ ID NO: 925 - protein, 107 aa, Artificial Sequence
  Light Chain Sequence
DIQMTQSPSSLSASLGERVSLTCRASQDIGGNLYWLQQGPDGTIKRLIYATSSLDSGVPKRFSGSRSGSDYSLTISSLESEDFVDYYCLQYSSSPWTFGGGTKMEIK

SEQ ID NO: 926 - protein, 118 aa, Artificial Sequence
  Heavy Chain Sequence
EVQLVESGGGLVQPGGSLRLSCAASGFTFSHYTLSWVRQAPGKGLEWVSVISGDGSYTYYADSVKGRFTISSDNSKNTLYLQMNSLRAEDTAVYYCARNFIKYVFANWGQGTLVTVSS

SEQ ID NO: 927 - protein, 107 aa, Artificial Sequence
  Light Chain Sequence
DIELTQPPSVSVAPGQTARISCSGDNIGSFYVHWYQQKPGQAPVLVIYDKSNRPSGIPERFSGSNSGNTATLTISGTQAEDEADYYCQSYANTLSLVFGGGTKLTVL

SEQ ID NO: 928 - protein, 129 aa, Artificial Sequence; identical to SEQ ID NO: 321
  Heavy Chain Sequence

SEQ ID NO: 929 - protein, 108 aa, Artificial Sequence
  Light Chain Sequence
QPGLTQPPSVSVAPGQTARITCGGNNIGSKSVHWYQQKPGQAPVLVVYDDSDRPSGIPERFSGSNSGNTATLTISRVEAGDEADYYCQVWDSSSDHYVFGTGTKVTVL

SEQ ID NO: 930 - protein, 123 aa, Artificial Sequence [sequence omitted]

SEQ ID NO: 931 - protein, 107 aa, Artificial Sequence [sequence omitted]

SEQ ID NO: 932 - protein, 126 aa, Artificial Sequence
  Heavy Chain Sequence
QVQLVQSGAEVKKPGASVKVSCKASGGTFSSYAISWVRQAPGQGLEWMGGFDPEDGETIYAQKFQGRVTMTEDTSTDTAYMELSSLRSEDTAVYYCATGRSMVRGVIIPFNGMDVWGQGTTVTVSS

SEQ ID NO: 933 - protein, 107 aa, Artificial Sequence
  Light Chain Sequence
DIRMTQSPSSLSASVGDRVTITCRASQSISSYLNWYQQKPGKAPKLLIYAASSLQSGVPSRFSGSGSGTDFTLTISSLQPEDFATYYCQQSYSTPLTFGGGTKVEIK

SEQ ID NO: 934 - protein, 119 aa, Artificial Sequence
  Heavy Chain Sequence
QVQLVESGGGVVQPGRSLRLSCAASGFTFSSYDMHWVRQAPGKGLEWVAVIWYDGSNKYYADSVKGRFTISRDNSKNTLYLQMNSLRAEDTAVYYCARGSGNWGFFDYWGQGTLVTVSS

SEQ ID NO: 935 - protein, 107 aa, Artificial Sequence
  Light Chain Sequence
DIQMTQSPSSLSASVGDRVTITCRASQGISRWLAWYQQKPEKAPKSLIYAASSLQSGVPSRFSGSGSGTDFTLTISSLQPEDFATYYCQQYNTYPRTFGQGTKVEIK

SEQ ID NO: 936 - protein, 119 aa, Artificial Sequence
  Heavy Chain Sequence
QVQLQESGPGLVKPSETLSLTCTVSGFSLTNYGIHWIRQPPGKGLEWLGVIWARGFTNYNSALMSRLTISKDNSKNQVSLKLSSVTAADTAVYYCARANDGVYYAMDYWGQGTLVTVSS

SEQ ID NO: 937 - protein, 106 aa, Artificial Sequence
  Light Chain Sequence
DFVMTQSPAFLSVTPGEKVTITCSAQSSVNYIHWYQQKPDQAPKKLIYDTSKLASGVPSRFSGSGSGTDYTFTISSLEAEDAATYYCQQWTTNPLTFGQGTKVEIK

SEQ ID NO: 938 - protein, 121 aa, Artificial Sequence [sequence omitted]

SEQ ID NO: 939 - protein, 112 aa, Artificial Sequence [sequence omitted]

SEQ ID NO: 940 - protein, 121 aa, Artificial Sequence
  Heavy Chain Sequence
QVQLQQSGAEVKKPGSSVKVSCKASGYTFTSYNMHWVKQAPGQGLEWIGAIYPGMGDTSYNQKFKGKATLTADESTNTAYMELSSLRSEDTAFYYCARSTYYGGDWYFDVWGQGTTVTVSS

SEQ ID NO: 941 - protein, 106 aa, Artificial Sequence
  Light Chain Sequence
DIQLTQSPSSLSASVGDRVTMTCRASSSVSYIHWFQQKPGKAPKPWIYATSNLASGVPVRFSGSGSGTDYTFTISSLQPEDIATYYCQQWTSNPPTFGGGTKLEIK

SEQ ID NO: 942 - protein, 123 aa, Artificial Sequence [sequence omitted]

SEQ ID NO: 943 - protein, 107 aa, Artificial Sequence
  Light Chain Sequence
DIQMTQSPSSLSASVGDRVTITCRASQYFSSYLAWYQQKPGKAPKLLIYGASSRASGVPSRFSGSGSGTDFTLTISSLQPEDFATYYCQQYLGSPPTFGQGTKVEIK

SEQ ID NO: 944 - protein, 120 aa, Artificial Sequence
  Heavy Chain Sequence
QVQLQQSGAEVKKPGASVKVSCKASGYTFTDYYMKWVKQSHGKSLEWMGDIIPSNGATFYNQKFKGKATLTVDRSTSTAYMELSSLRSEDTAVYYCARSHLLRASWFAYWGQGTLVTVSS

SEQ ID NO: 945 - protein, 113 aa, Artificial Sequence
  Light Chain Sequence
DFVMTQSPDSLAVSLGERATINCKSSQSLLNTGNQKNYLTWYQQKPGQPPKLLIYWASTRESGVPDRFTGSGSGTDFTLTISSLQAEDVAVYYCQNDYSYPYTFGGGTKLEIK

SEQ ID NO: 946 - protein, 125 aa, Artificial Sequence; identical to SEQ ID NO: 684
  Heavy Chain Sequence (if bispec)

SEQ ID NO: 947 - protein, 112 aa, Artificial Sequence; identical to SEQ ID NO: 685
  Light Chain Sequence (if bispec)

SEQ ID NO: 948 - protein, 120 aa, Artificial Sequence [sequence omitted]

SEQ ID NO: 949 - protein, 106 aa, Artificial Sequence [sequence omitted]

SEQ ID NO: 950 - protein, 121 aa, Artificial Sequence [sequence omitted]

SEQ ID NO: 951 - protein, 115 aa, Artificial Sequence [sequence omitted]

SEQ ID NO: 952 - protein, 127 aa, Artificial Sequence [sequence omitted]

SEQ ID NO: 953 - protein, 107 aa, Artificial Sequence [sequence omitted]

SEQ ID NO: 954 - protein, 128 aa, Artificial Sequence
  Heavy Chain Sequence
QVQLVESGGGVVQPGRSLRLSCAASGFTFSSYGMHWVRQAPGKGLEWVAVMWYDGSNKDYVDSVKGRFTISRDNSKNTLYLQMNRLRAEDTAVYYCAREKDHYDILTGYNYYYGLDVWGQGTTVTVSS

SEQ ID NO: 955 - protein, 107 aa, Artificial Sequence
  Light Chain Sequence
DIQMTQSPSSLSASVGDRVTITCRASQGIRNDLGWYQQKPGKAPKRLIYAASSLQSGVPSRFSGSGSGTEFTLTISSVQPEDFVTYYCLQHNSNPLTFGGGTKVEIK

SEQ ID NO: 956 - protein, 117 aa, Artificial Sequence
  Heavy Chain Sequence
EVQLVQSGAEVKKPGASVKVSCKASGYTFTDSYMSWVRQAPGQGLEWIGDMYPDNGDSSYNQKFRERVTITRDTSTSTAYLELSSLRSEDTAVYYCVLAPRWYFSVWGQGTLVTVSS

SEQ ID NO: 957 - protein, 107 aa, Artificial Sequence
  Light Chain Sequence
DIQMTQSPSSLSASVGDRVTITCRASQDISNYLNWYQQKPGKAPKLLIYYTSRLRSGVPSRFSGSGSGTDFTLTISSLQPEDFATYYCQQGHTLPPTFGQGTKVEIK

SEQ ID NO: 958 - protein, 117 aa, Artificial Sequence
  Heavy Chain Sequence
EVQLVESGGGLVQPGGSLRLSCAASGFTFSDYWMDWVRQAPGKGLVWVSNIDEDGSITEYSPFVKGRFTISRDNAKNTLYLQMNSLRAEDTAVYYCTRWGRFGFDSWGQGTLVTVSS

SEQ ID NO: 959 - protein, 111 aa, Artificial Sequence
  Light Chain Sequence
DIVMTQSPDSLAVSLGERATINCKSSQSLLSGSFNYLTWYQQKPGQPPKLLIFYASTRHTGVPDRFSGSGSGTDFTLTISSLQAEDVAVYYCHHHYNAPPTFGPGTKVDIK

SEQ ID NO: 960 - protein, 118 aa, Artificial Sequence
  Heavy Chain Sequence
QVQLVQSGAEVKKPGASVKVSCKASGYTFTNYGMNWVRQAPGQGLKWMGWINTYTGEPTYADAFKGRVTMTRDTSISTAYMELSRLRSDDTAVYYCARDYGDYGMDYWGQGTTVTVSS

SEQ ID NO: 961 - protein, 111 aa, Artificial Sequence
  Light Chain Sequence
DIVMTQSPDSLAVSLGERATINCRASKSVSTSGYSFMHWYQQKPGQPPKLLIYLASNLESGVPDRFSGSGSGTDFTLTISSLQAEDVAVYYCQHSREVPWTFGQGTKVEIK

SEQ ID NO: 962 - protein, 123 aa, Artificial Sequence
  Heavy Chain Sequence
EVQLVQSGAEVKKPGASVKVSCKASGYTFTDYEVHWVRQAPGQGLEWMGVIDPGTGGVAYNQKFEGRVTMTADTSTSTAYMELRSLRSDDTAVYYCTRYSLFYGSSPYAMDYWGQGTLVTVSS

SEQ ID NO: 963 - protein, 106 aa, Artificial Sequence
  Light Chain Sequence
EIVLTQSPDFQSVTPKEKVTITCSASSSVNYMHWFQQKPDQSPKLWIYRTSNLASGVPSRFSGSGSGTDYTLTINSLEAEDAATYYCQQRSSYPWTFGQGTKLEIK

SEQ ID NO: 964 - protein, 117 aa, Artificial Sequence
  Heavy Chain Sequence
QVELVESGGGLVQPGGSLRLSCAASGFTFTSYWMSWVRQAPGKGLELVSSITSYGSFTYYADSVKGRFTISRDNSKNTLYLQMNSLRAEDTAVYYCARNMYTHFDSWGQGTLVTVSS

SEQ ID NO: 965 - protein, 110 aa, Artificial Sequence
  Light Chain Sequence
DIVLTQPPSVSGAPGQRVTISCSGSSSNIGSNSVSWYQQLPGTAPKLLIYDNSKRPSGVPDRFSGSKSGTSASLAITGLQSEDEADYYCQSRDTYGYYWVFGGGTKLTVL

SEQ ID NO: 966 - protein, 118 aa, Artificial Sequence
  Heavy Chain Sequence
EVQLVESGGGLVKPGGSLRLSCAASGFTFSSYSMNWVRQAPGKGLEWVSSISSSSSYIYYADSVKGRFTISRDNAKNSLYLQMNSLRAEDTAVYYCARVGLMGPFDIWGQGTMVTVSS

SEQ ID NO: 967 - protein, 107 aa, Artificial Sequence
  Light Chain Sequence
EIVLTQSPGTLSLSPGERATLSCRASQSVSRYLGWYQQKPGQAPRLLIYGASTRATGIPDRFSGSGSGTDFTLTITRLEPEDFAVYYCQQYGSSPWTFGQGTKVEIK

SEQ ID NO: 968 - protein, 125 aa, Artificial Sequence [sequence omitted]

SEQ ID NO: 969 - protein, 107 aa, Artificial Sequence [sequence omitted]

SEQ ID NO: 970 - protein, 114 aa, Artificial Sequence
  Heavy Chain Sequence
EVQLLESGGGLVQPGGSLRLSCAASGFTLSTHAMSWVRQAPGKGLEWVATISSGGRSTYYPDSVKGRFTISRDNSKNTLYLQMNSLRAEDTAVYFCARLISTYWGQGTLVTVSS

SEQ ID NO: 971 - protein, 107 aa, Artificial Sequence
  Light Chain Sequence
DITMTQSPSSLSASVGDRVTITCKASQDINSYLTWFQQKPGKAPKILIYLVNRLVDGVPSRFSGSGSGQDYALTISSLQPEDFATYYCLQYDDFPYTFGQGTKVEIK

SEQ ID NO: 972 - protein, 115 aa, Artificial Sequence [sequence omitted]

SEQ ID NO: 973 - protein, 107 aa, Artificial Sequence [sequence omitted]

SEQ ID NO: 974 - protein, 124 aa, Artificial Sequence
  Heavy Chain Sequence
QVQLVQSGAEVKKPGASVKVSCKASGYTFTGYYMHWVRQAPGQGLEWMGWINPNSGGTNYAQKFQGRVTMTRDTSISTAYMELSRLRSDDTAVYYCARDHGSRHFWSYWGFDYWGQGTLVTVSS

SEQ ID NO: 975 - protein, 107 aa, Artificial Sequence; identical to SEQ ID NO: 859
  Light Chain Sequence

SEQ ID NO: 976 - protein, 121 aa, Artificial Sequence
  Heavy Chain Sequence (if bispec)
QVQLVQSGAEVKKPGASVKLSCKASGYTFTAYYINWVRQAPGQGLEWIGRIYPGSGYTSYAQKFQGRATLTADESTSTAYMELSSLRSEDTAVYFCARPPVYYDSAWFAYWGQGTLVTVSS

SEQ ID NO: 977 - protein, 107 aa, Artificial Sequence; identical to SEQ ID NO: 859
  Light Chain Sequence (if bispec)

SEQ ID NO: 978 - protein, 118 aa, Artificial Sequence
  Heavy Chain Sequence
QVQLQQPGAELVRPGASVKLSCKASGYTFTSYWINWVKQRPGQGLEWIGNIYPSDSYTNYNQKFKDKATLTVDKSSSTAYMQLSSPTSEDSAVYYCTRSWRGNSFDYWGQGTTLTVSS

SEQ ID NO: 979 - protein, 113 aa, Artificial Sequence
  Light Chain Sequence
DIVMTQSPSSLTVTAGEKVTMSCKSSQSLLNSGNQKNYLTWYQQKPGQPPKLLIYWASTRESGVPDRFTGSGSGTDFTLTISSVQAEDLAVYYCQNDYSYPFTFGSGTKLEIK

SEQ ID NO: 980 - protein, 197 aa, Artificial Sequence
  WT NS3
APITAYAQQTRGLLGCIITSLTGRDKNQVEGEVQIVSTATQTFLATCINGVCWTVYHGAGTRTIASPKGPVIQMYTNVDQDLVGWPAPQGSRSLTPCTCGSSDLYLVTRHADVIPVRRRGDSRGSLLSPRPISYLKGSSGGPLLCPAGHAVGLFRAAVCTRGVAKAVDFIPVENLETTMRSPVFTDNSSPPAVTLTH

SEQ ID NO: 981 - protein, 197 aa, Artificial Sequence
  T54A NS3
APITAYAQQTRGLLGCIITSLTGRDKNQVEGEVQIVSTATQTFLATCINGVCWAVYHGAGTRTIASPKGPVIQMYTNVDQDLVGWPAPQGSRSLTPCTCGSSDLYLVTRHADVIPVRRRGDSRGSLLSPRPISYLKGSSGGPLLCPAGHAVGLFRAAVCTRGVAKAVDFIPVENLETTMRSPVFTDNSSPPAVTLTH

SEQ ID NO: 982 - protein, 197 aa, Artificial Sequence
  AI NS3
APITAYAQQTRGLLGCIITSLTGRDKNQVEGEVQIMSTATQTFLATCINGVCWAVYHGAGTRTIASPKGPVIQMYTNVDQDLVGWPAPQGSRSLTPCTCGSSDLYLVTRHADVIPVRRRGDGRGSLLSPRPISYLKGSSGGPLLCPAGHAVGLFRAAVCTRGVAKAVDFIPVENLETTMRSPVFTDNSSPPAVTLTH

SEQ ID NO: 983 - protein, 197 aa, Artificial Sequence
  TI NS3
APITAYAQQTRGLLGCIITSLTGRDKNQVEGEVQIVSTATQTLLATCINGVCWTVYHGAGTRTIASPKGPVIQMYTNVDKDLVGWPAPQGSRSLTPCTCGSSDLYLVTRHADVIPVRRRGDRRGSLLSPRPISYLKGSSGGPLLCPAGHAVGLFRAAVCTRGVAKAVYFIPVENLETTMRSPVFTDNSSPPAVTLTH

SEQ ID NO: 984 - protein, 14 aa, Artificial Sequence
  NS4A
TGCVVIVGRIVLSG

SEQ ID NO: 985 - protein, 9 aa, Artificial Sequence
  Cleavage site
DEMEECSQH

SEQ ID NO: 986 - protein, 10 aa, Artificial Sequence
  Cleavage site 2
DLEVVTSTWV

SEQ ID NO: 987 - protein, 10 aa, Artificial Sequence
  Cleavage site 3
ECTTPCSGSW

SEQ ID NO: 988 - protein, 10 aa, Artificial Sequence
  Cleavage site 4
EDVVCCSMSY

SEQ ID NO: 989 - protein, 18 aa, Artificial Sequence
  T2A
EGRGSLLTCGDVEENPGP

SEQ ID NO: 990 - protein, 19 aa, Artificial Sequence
  P2A
ATNFSLLKQAGDVEENPGP

SEQ ID NO: 991 - protein, 109 aa, Artificial Sequence
  CD19 Light Chain
IPDIQMTQTTSSLSASLGDRVTISCRASQDISKYLNWYQQKPDGTVKLLIYHTSRLHSGVPSRFSGSGSGTDYSLTISNLEQEDIATYFCQQGNTLPYTFGGGTKLEIT

SEQ ID NO: 992 - protein, 118 aa, Artificial Sequence
  CD19 Heavy Chain
EVKLQESGPGLVAPSQSLSVTCTVSGVSLPDYGVSWIRQPPRKGLEWLGVIWGSETTYYNSALKSRLTIIKDNSKSQVFLKMNSLQTDDTAIYYCAKHYYYGGSYAMDYWGQGTSVTV

SEQ ID NO: 993 - protein, 124 aa, Artificial Sequence
  CD22 Heavy Chain
QVQLQQSGPGLVKPSQTLSLTCAISGDSVSSNSAAWNWIRQSPSRGLEWLGRTYYRSKWYNDYAVSVKSRITINPDTSKNQFSLQLNSVTPEDTAVYYCAREVTGDLEDAFDIWGQGTMVTVSS

SEQ ID NO: 994 - protein, 107 aa, Artificial Sequence
  CD22 Light Chain
DIQMTQSPSSLSASVGDRVTITCRASQTIWSYLNWYQQRPGKAPNLLIYAASSLQSGVPSRFSGRGSGTDFTLTISSLQAEDFATYYCQQSYSIPQTFGQGTKLEIK

SEQ ID NO: 995 - protein, 18 aa, Artificial Sequence
  scFv Linker 1
GSTSGSGKPGSGEGSTKG

SEQ ID NO: 996 - protein, 15 aa, Artificial Sequence
  scFv Linker 2
GGGGSGGGGSGGGGS

SEQ ID NO: 997 - protein, 18 aa, Artificial Sequence
  scFv Linker 3
GGSSRSSSSGGGGSGGGG
